United States Patent Application Publication US 2026/0258423 A1 - sequence listing, part 74

SEQ ID NO: 301568 - DNA, 83257441 bp, Homo sapiens (residues 74,718,246-76,853,052 of 83,257,441)
  source 1..83257441: mol_type = genomic DNA
atcgtgccattgcactccagcctaggtgacagagtgagacactgtctctaaaacatcatatcatatcatacatcatatcatatcatatcatatcatatcatatcatatcatatcatatccacccagtctatggtattttgttatagcagccgggactaagatagtgggttagagaaaaaaaaagggctctttgattttcagaatagagcacctgtcatctttgctacctgctccttgacaaagtggaagagctgcaattgaggctccccctgcctagaaaatttgatcttgtttttaagcacctattaattggctagatgtatttggaaaaaaaaacaagcgtttgttcagcaacaggtaggctaaacttgggcatccccttagctttcatcagattccccagtgcaatgcacctcctcaacacacacacagactttttcccactacaaaagtaatgtgtgtttgttagagaaaaacagtgaaatacagatgaacacaaagaatgcatcttaagtcactccgaatcctgccacacagaaataactgctgttaaatatatgtgtgtgtatctattaccaatcttttgttcttctgtagaaaagcaatttatttcaggttacatgaaggatcactcatgtatgagtttgctttaccaactggactactacctttattagggcattttaatacaggaaaaacataaaaagtatggcagtggagggtgttgataatggggaaggttatacatctgtgggggaaaagggtctgtggaaaaatccctgtatcttctgcccagtgttaatgtgaacctagaaattctctaaaaattaaatcctattttataaaaaagagagacatggccgaaaataccagctctgaaatacctccagttaatactttctttaaaaaggtaaaatgcaggccaagtttggtggctcacacctttaatctcagcactttgggaggccaagatgggtggattacttgagcccaggagatcgagaccagcctgggaaacatggtgaaaccccaactctgcaaaaaatacaaaaaaattagctgggcacagtggcatgtgcctgtagtcccagttacttgggaggctgaagtgggaggatcacccgagcccagagaggtcgaggctgcagtgactcgtcatcatgagccacagcactccagactgggcaacacagcaagaactcatctcaaaaaaataaataaataaaataaaataatttgctcacaattacctttctttttcttttccttttttttcttttgagatgggttctcactgtgtcaccaaggctagagtacagtggtgcaattatagctcaatgcagctgtaattctggaaaatctcctggactcaagtaatcctcctgcctcagcctccccaatagctgggaatacaggcatgcaccaccaagcccagcttattgttttatttattgtagaatagggtcttcctatgttttcaagctggtctcgaactcctgggctcaagtgatcctcctgcctttggcctccccaagcactggaattacaagtgtgagccactgtacctggccaagcaaattatttaaataaattttttaaaacatagaaaaagattaaatgaaaagtaaaagtcttatctccatttcccacctaccagccccagaacctcaaaggcaatcctcttggcctctattgcctccctgagaaaagttaatcatactccagcagataaacctaagtaacatatacacattcatcatactatatacatcactctgccccctgcttcttttgcttaataatgaactttctcccaaacagtgagacaggagagttcctttgacccttttgcaggtaggaactggagggcaccagctctgggtccagtcggccatttaggcaccagcagggacgaactttacttgctcgaacccactgggttcagcccctcgtgagagggagcacacaggcaagtgggtgctagggctgggacgagtacttttgggctctggccccacggcagcatgaaggggtgtgttacaattaaggttcttttaggccaggcatggtggctcacgactgtaatgccagcactttgggaggccgaggtgggtggatcacctgaggccaggagttcaagaccaacgtggccaacatggcgaaaccccatctctactgaaaaaaaaaacccaaaatttggcagggtgtggtggcgggtgcctataatcccagctacttgggaggctgaggcaggagaattgcttgaacccaggaggtggaggttgcagtgagccaagatcccaccattacactccagcctgtgtgacagactgagcctctgtctcaaaaaaataaaagaaaagaaaaacacaattaatgctcttttagcagttgccatccacagatggctaagtgttagccagctcagcggagagtcaaggtgacagcctttttacaccctgccctcttggtacagagttaagtgttaaccagctcagtggagagccagggtgacagccttttacaccctgctctcttggtacccgggttcttgtcaggtgtccaggaagaatcaggtcacatagacttgaaggatgatgaatgcggagattttattaagcggtggaagtggctctcagtggaaggggagctggaaaagggatggtgtgggaagaaggtgatctttccctgaagcctggctggagataaccgggctcctctctgaagccgtgccatctgaagttaagccgtgtctatccgtatgctccgatgctcagttgcttccactcttgacgttcagctgcttgtctcttctctccttctcagctacaccactctgctcgtctgccaagagctttttatgggtacagggctggggacatggtgggccagggtggttttggaaaaggcaacattcaggcaggaaaacaggaatgcatgttctcatttagggccgcaggtccaggcttgagggtggagccatcgccaggacctcgccctcttttacccagtatttccctgctgcaacagggacatacagtacatacagatcttcctcatccttttactgttttcacagtactgcattgtatgtatattctagagtttacttcactagtctctactgctgaattatttgttcttacaaacactacaatgagcatccttatacacatatcttggtttactttttttttttttttttgagatggagtcttgttctgtcacccaggctgtagtgtaatggtgtgatcttggctgactgtaacctccacctcccaggttcaagtgattctcctgcctcagcttcccgagtagctggcattacaggtgcacgtcaccatgccctgctaatttttgtattttcagtagagacag[135 bp omitted]agagttgctgagtcaaaggaatttgcacttgaaaccttgatagatattgtcagttgctatccaaaatggttgctcaatgtatactcccactaatagtgtatgtatgagtgcctgtttccccaaatctaagccagtactgaccattaccaaacttttatcaagccgctatacattatattgtcattgtatcggttagggttctccagagaaacagaa[375 bp omitted]gcaagtccaaactctgtagggccagcccaaaggctgtaaattttcaggcgagagttgatgctacaaacacgaggcagaatttctgcttcctcagggaaacctcagttttgctcttaaactctttcaattaatcagaggacactcacccagattactgaagacttaaagtcagctgcttggagatgttaacaacatcaacaaagtaccttcacagcaacatctagattagtgtttaattgaataagtaggactatagtccagccaagttgacacataaaactaaccacatgtacacaaaaatatatcaacctattcacatcctttgttcacttttctattgaagttttcttctgagagctctccttatatgagggatattaccatatgtcatatgtctcgaaaatatcttccctgtaccatttctcattcgactttgtttgtggaatcttctgtcaaccaaaacatttttattgcagcaaatctatcgatcttttctttatggcatctgaatttcctgtcttgttaagaaggtcactcagagccactttaggagccatggtaaccatcccatttatcaggttttctaaaagctgtccctgaataataaagtcacagaaaagcagcaatagtgtacttagacagcattagcctggctcccattgagaggcctggataaagtaggatttaatgttatgccctgcatttatcaagggtcgatacaacagctttagaaaaagctttgcgtcttccgcaaagttgcaattgcccattttgttattcaaggccccttgcagaaggatccacttaacagattatagcagtgtataacaggagaaaatactcgatggaaaggactcaggcatacaatgtcagacaagtaccatacaccccacctggttttcccctttgccttgattgtcaggaaacctataaccaaacacaatgctcaaacgcagtaacaacctaacctcactctgggatggaagatttgccccagcccaccccacccctacacacacacccctattctttgtatattttttcaggcaatttcttgaactgccttctcgtacttgtgggtttgtttgaaaccacctgtccccattggaagtgaatgaggcacaaatacagatataaacaaaatgactcaagaaagaacaaagacgcttgtctgaatggtggcaaagttgacccagaggtttctgtctgaaccacaattaactaactttttttttttttttttttttgagacggagtctcactctgtcgcccaggctggagtgcagtggcgtggtctcggctcaccacaacctctgcctcctggattcaagtgattctcgtgcc[132 bp omitted]ggcctctcaaaatgctgggattacaggcatgagccaccgcacccggccgtaacattttcataaatgcgaagagaaacacaaagagggaaggcatggtgacaaatctggacccaaagttgacattcagcttctccaagcagtgaaactgggaaccaacttggagaaatttaaggaattttcagcagctgttgggtggcgagagaagctctgctgggttatctgtgaaaccagaaaatctgagacaagtctcagttaatttagaaagtttattttgccaaggttcaggacgtgcccatgacacagcctcaggaagtcctgacgacatgtggccaaggtggtcagggcacagctaggctttacacattttagggagacatgagacatcaatcaagatatgttaagaagtgcattggtttggtctggaaaggcgggacaactcagaagcaaaggcagaagactggaaacatggagggagcttccagatcacagatagttgcattcttttgagtttccaatgagcctttccaaaggaggcaatcagatatgcatctatctcagtgagcagatgggtgacttagatgaatagatgggaggtaggtttgccctaagcagtttgcagcttgagctttccttagtgattttgggggcctaagatattttcctttcacatatctgtctcatgtgtccgtgtgaagagaccaccaaacaggctttgtgtgagcaacgtggctgtttatttcacctgggtgcaggcaggctgaatccgaaaagagagtcagcaaagagcagtgggattatcattggttcttacaggtttggggataggcagtggagttaggagcaatgttttgcgggcagggatggatctcacaaagtacattctcaagggtggggagaatagaaaagaaccttcttaagggtaggggagatgacaaagtacattgaccagttagggtggggcagaaacaaatcacaatggtggaatgtgatcagttaaggctattttcacatcttttgtggctcttcagttgcttcaggccatctggatgtatacgtgcaggtcacaggggatatgatggcttagcttgggctcaaaggcctgacaatatctaaggtaatggatttaggcagctccatccctaacatttgggggccagggctagaatacaaatggaggcccacataccatgtgtctcagtatcttaacattctaaagcaagctcaaaaagctacaaaatcaagtgtgtctaatcttccctcctgaacaaaataccttcttaccaacctggaagccaggttagcatgtaggattctcagaagttccacactaaaatgtggcagcctagggacaaacaacctcctgtccccagccccccacccacaagctcctctccttctcctcccacccttgggcaccccaaccccaaaggaattttcagcagctgttgagtggcgagagaagacatgtaacaagtgcttttggtttggtcagaagaatgcatgaggctccacatccaagctctgtccacagcccctgcaaatcgtcaccccttggccacaccacagacctagggatgccaccataagagcaaccttggggaaaagtgcagtcagtctacaggaggaataggagcctttggccatgtggacacctcgcttcatggggaggagcacagagaaggagcaggcctaagggaggtcctaggtttaggaagagatcattcaacaatgcttgtaaatagaccagcgctgagctctccacgatggcctaggtaaaaagctcttagagtcattatcagtagatttttttttttttgagacggagttttgctctgtcacccaggctagagtgcagtggcatgatcttggctcaccgcaacctccaccacccgggttcaagggattctcctgcctcagcctcccaagtagctgggattacaggtgcctgccatcacgcctggctaatttttgtatttttagtagagacagcatgttggccaggctgacttcaaactcctgacttcaggtgatctgcccatcttggcctcccaaagtgctgggattacaggcttgagccaccgcacctggccattgtcaata[174 bp omitted]tggcgggcgcctgtagtcccagctacttgggaggctgaggcagaagaatagcttgaactcgggaggcaaaggttattgtgagccgagattgtgacaccgcattccagcctgggcgacagagagagactctgcctaaaaaaaaaaaaaaaaaagaccatgaccaatatgagaggatcatcctgccccaccccgagccaaggttcagctgaatctgaaatgctgaaccctatgtgcacccccggacctcagtgagctggaaaatgtcccgagaagacaggactgtttcctatgatgaaaattgatggaaactcctcaccctggaaaggaaaaggataaaagtgaaaagaattagaatctgtcacattctttaagacacgaatgaggggaacgtggatggactacccctcacattctggaatattctctctaggaagcacttcttaaagcctgaggaagttagattctagatgtaaattattaaaaccactgcacataacaaacaaatgagttctctaaccaggaggaaataaaagctggagaggttcaggaggtgggtgggggcacagtcatgggacatccaaagtcaatgccatggacaacctcatggtaagcagacgctgatatgcattcccttccatgtcactgccagagttgaacagtggctgggcccgacccaaagaggcccagccaatctctatgcttttacggtttagttgtttttatgtctttatgtttttacaagtccagctaaagtttgcacctcctagtcctttcacacagtcttgaattcttgtctttggaaagaggccactgtccactttacactaaggcatttatccactcacccattcattcatccattcattgagggtaccagcctctgggtgcatgtagagttcttctctgttgtttatgattttctttcaaacatttcatctgaacttccaagctaattatcgccccttctccctcccagttcagacctcccagaggaaggcggccttccccctcttttcccagaatctgcttctctttgaaatcttgtcttctccttgttctaagtccaagtgtgcaaggcacataccagctatctgattttgttttattctatagactggatttttggggctctcccacacaggagatctatggacattgtgttagtcccggtcttccgaagaggagatgtgaagagggaatcaaatgtgcaagggttttactgagggaaatgcctgtgagagaaatagagtaggtgccagggaggccaggggagccttcagaccatgatgcaggttggatccccgtgaaggaaagagggcagaaaggttgcatggaagcatcccagaccaccttgcagtatctggagggttgtgcaaggccatgagggagcccttgagctaactcaaccgttagaggggtcctgtgtctcccaggaacaggcctgcctcagtgtccctgctgtgctccgcctttggctggtaattgcctgtaggaagcatgaccttggtgcaaacatgacaatgatggctttcagagcacggcagtggggaccatcggtcatggatgcccctgtggatggaagtctgagagacacattctcatggtcacttcagatgctcattaacttggagggagatctcctctgtgccttcatgcccctttcagtgacttcaatagaaaatcgagactttagtgtgtttgtgtgtctgggtgtatgtgtgggtatctgtgtgcatgtgtatgtgtttttatgtgtgtgtgtctgtgtctgtgtttgtgtttatgtttgtgtgtatatctgtgcatgtgtgcatgtttgcgtgtatgctgcatgtctgtgaatgtgtgtgtctgtgtgtcggtgcctgtgtatatgtgtctgtgtgtctgtgtgaatgtgcatatgtatgtgtatatatatatgtgtttgtgttatacatgtctctgtgtatgcatgtctgtatatgcatgtctgtgtgtttctgagtttctgtgtgtgtgcatgtgtgtctgtgtgcatgtctttgtatatgtttctgtgtgcatgtgtttgtgtgcacatgtgtctatgtctgtgtatatgcatgtctgtgcgaatgtgtgtttctgtgtgtttgcatgtgtgcttgtgtctgtatatgaggatacatgttggtgtacatgtgtttccacatgtctgtgtgcatgtgtgtgttctgtgtgtatgtgtgtgtttgtgtgtacatgtgtgttttatgtgtactatgtgtatttgtgtttgtgtgtgtagatgtttttgtgtgtatgtgtatctgtgtgcatgtgtgtgttctttctatgtgtgcatgtatgttttgtgtgtttgtgttgtacaagtgtgtctgtgtctgtatacgtgtgtttctgtgtgtacacgtttttgtgtctgtgtgtgcatgtgtgtttctctgtgtgtgcatgtgtttgtgtgtgtgcctatgtttctgcatcatgtgtgttctgtgcatatgtgttgtatgtgtgtatgtttatgtgtgtgtgcctctgtatgcatctgtttctgtatgtatatgtgtgctctgtgtatgcatatgtttgtgtgtgcatgtgtgttctgtgcatgtgtgtgcatgtgtgttctgtgcatatatgtgtacatgtgtttttctgtgtctgtatgtgtcttgtgcatgtatgtttctgtgtcatgtgtgttctgtgcatacatgtgtacatgtgtttttctgtgtctgtatgtgtcttgtgcatgtatgtttctgtgccatgtgtgttctgtgtgtatgtgtgtacatgtgtttttctgtgtctgtacgtgtcttgtgcatgtatgtttctgtgtcgtgtgtgttctgtgtgtatgtgttgtacatgtgtgtacgtgtatgtgtgtgcttctgtgtgtatgtttctgtgtgtatgtgtgttctgtgtgtgcatatatgtttgtgtgtgcatgggtgttctgtgtatgtgtgtacatgtttttctatgtctgtatgtgtgtgtcagtgtcttgtgtgtgtgtgtttctgtgtgtgtgtgtgcatgttgtgcacatgcgtgcttagaaagaatccactcccacagccacaaggacacctctgaggccaactcacatcacaggccctcagctctctctctattgttcccttccagaccatcctggtgggtgacagtggtgtgggaaagacgtctctgctggttcagttcgatcagggcaagttcatccccggctccttctcggccactgtgggcatcggattcacggtaagcactggccggcactgccagctctgggcctgggctcaggaccccagcgtgtttctgttgagtgccagcaggaaacaggtggacactcgcattggatcattcaaggaggattaaggagaagactgttccccaaggtgtaggagggtgttgggtgaccaggagggagggtatactgcccctgggtagtccaggaactccgcccacctctagcctcaagcaggaagggaaggcaccctcaccagaacccagggacaaagcaggctgctgggtgagctgcctggcaggagctgcgtgggactttcagtggagggacacagcagcccatgggagccccccagggaggcagccaggagaacaatcccctgtcccaccttgctctcctcctgctccccatctccttctggggctccacattggatgaacgcaagtggaagccagaaagcaaaaaatattttaatatgggatagctcaggtcagccctccaaggcaagaagatctggagggacaaagggacgacaaagttttcagcacagtccaaacttagcagtcacacgggtctcagggagctggcaggcccaggttacagttccgtgtttagtcctcggtaaaatggtaaaagggcagctcgggttaaggaagcccagtgccctcggctttttctgcccgcagcccctctgcgagacaagggatccctcctttaccacacatcccatctccccgcgttgtcccgtgcctgcggctgcagctgcccttgaattcctgggaagaccttgggagagggttccactcctctctcgggctgtggcaggaagagcagggccttcccttgggactccagaatcctagcatctcaagatggggaagagcaaacatctcttcttggacaacgcggatgtttgggaacctctgagaccagagcacagggcctgtgagatcacgctcagggtcaggacgcagcagtgccacactgatgggaagagagagaggaaaactcagaaaaatgggcttgcccactgggtcacagccaggaaggcaggggttcagaatgaacatggcttctgcatgaccttccaggaggcaaagcggaagtgagtgcctggttcgggtgtgttctggggcctagaatcggccctgaaacaccagttcccagggctctccccagactgggaccggctgggctctggtagtgctgaatagggaagggctgagacccaggaggccaaggctacctggcaatccctgaggtctgggaccaggctgccatgaagcaaaccaggatgacctggtgccaggcgtcacccaccccagcccaggcccagtctgctctcagcagccagggcacaccctgccctcagggtcacacccgcatctcctcacccacccttctgcctgtctggtgaggaaggaagagagtggggtggatgtggctgtggacatgcaaagtctgactcacgttccacagaccacagaggtgagatctccaaattttgccgctagcttggcaagaaaattgaggccgatttcctgtgaaggaaaaagaaagtgtgtggtcaaactgtttgtctagcctgagatgagacacactgggctttcccactgacctcagggtgggcctcctagagcctgggctgcctgcttggtaccagccagcacccgatgttctggtgcatctcaggacaaacctgttgcctgcttacgctgagtgaggacctgagcccctggccagaaactcagcctggggacacctgagcaaagaactggtggacatcggggtctcctccagatatcagcggtctgggggtccccggagagccaggctacaagacacttgtttacccatctgtccttctcacggagatttgagatatggcatggataagggccctgccgctggccaggctgtagcctgcaactcctgcatgatgggaagggaggcaggtgctgccacaggctccgctcaggaggctgagtgccgcccaggtggcaggggagggacagagcccctggtctcccactttggaggagccagaggtgagcagggtgactacctcgggcatgccttcacccataaactaccaggcccatcgccttctggaagtgggacctgcccaggtcctgtgtagatgcctctcagtcaagaccttccctaaattctccactaccagccccatcaaactggctgtgggggtcgtgctgatggggttatggcacactgatgtcgatggggttcacacaggggtctttccagtccaccacagttcaggtcctccttgttacctctctcctcagtttcccccaaattccctagtcttgcctaaacactgatg[135 bp omitted]accccttctctactaaaaatacaaaaacgtttgccaggcgtggtggcacacgcctgtaatcccagctacttgggaggctgaggcaagagaatcacttgaacctgggaggcggaggttgcggcgagccaatatcatgccattgcgctacagcctgggcaacagagtgagactccatctcaaaacaacaacaacaaaaaaaaaaaaacacctcactctgctcatcccccacctgaacattcacggttcactattaccttccaaataaagtctgaatctctcatctgttggtcaagctgttgcacagtttagaccagtggttttcgaacactccttcagcgcacataaaagcctccagggggaagctcatctgaaatgcaaattctaagctccctcatacacatgctgcttcagtaaaaccacgtggggggcccagaatctgggggttctgacccagggggtccatgcgccacattttgcaaaacatgagttgaggccttgtccctccagtctctgcccgggtctccttcccacatcccgaccctgtgctctttgggctgtgctgttccccagctctgaagttttctgccatcgacctggatagcagggagtcccctgcccccatctctgcaggtgtgatttgaggtgtgtgtggtgaggtgatttgaggggtgtggcaggtgtgtggtgtgatttgaggtgcgtggtgaggtgtgtggtgtgatttgaggggttaggtgtgtgtggtgtgagtgtgtgtgtatggtgaggtgtgtgtgtctggggtgtgatttgaagtgtgtgtggtgtgaggtgtatgtggtgtgatttgatgtgtgtgtatgtggcgtgagatgtgtatggtgtgatttgaggggtgtgtggtgtgacgtgtgtggtgtgatttgaggtgtgtgtgatgaggtgtgtggtgtgatttgaggggtgaggtgtgtgtggtgtgaggtgtgtgtggcgtgatttgaggtgtgtgtgtgtggtttcaggtgtacacaagagcccccccatctttcaacacgcatgagggtctgtctcactgacacttggtacctccactatcagcagggctgcatgacaatgacagtgtgatctgtgatcaggagggtaggggtgtctatttgggggtattgtgggggtgtgcgtctcagatctggaggcaataagaggtgttgggggtcatttatagggtgatatacacatttggtgatggtgtgaggcatggggtccattggagaggcaggtgtttgcacagtgatgtggcacaggtgttgatggtgtgaaataaactgtgcctggagctgcactgtggtgacaggagtgtgtgtttggagtgaaatgaggtatgtgtgtttgagggtcatgtaagatgtgtatgtatgtggtatgatggtaggtgtgtttgtttatagtatgaggtgcacatttgtggcataatacaaagttgtgtgtgggacatgttatgaagtgtgtgtttgtggtataatgtagggtgtgaggcatgtgtatttatggtatgatgtgaggcagatgtgtgtggtatgatgtagggtgtgtgtgtatatttgtggtgtgatttgagagtgtatgtgtgtgatgtgaggtgtgtgtgatttgagggatgtgtgtggtgtgaggtgtgtggtgtgatttgaggtgtgtgtggtgaggtgtgtggtgtgatttgaggggtgaggtgtgtatggtctgaggtgtgtgtgtgtggtgaggtgtgtgtgtctgtggtgtgttgtgggtgggtgcacacgtgtgagtgtctgtggtgtgtgtctggggagagacacaggctaccacagcgcatacacagcctcagagtgaacgttaggaggcccaggtttcctccccagagaccacacggatcccttagtgagtccctattctgcacagcccctgttccctgttctgaatgtcttagaccctaacccacttctgactcacccgaggctgcccttgaacaccctacaggacattacagtggccctggggacagtgtacgcaccctccaagtatgacattacccacataccacagacccagcaggcctgcagcccctctccccatgttcaaagacttcttccctaggtcagattcctccatccagactagtgcagcaacgcagcagggaagtgcttcaggccactgctccttctggatgattcgtgctaatgttcaaccttctgtattccaaacccaccataggacaaagagggccttggagccaacaacgtgaaccacagctggaggctagaaatctgaactcaaagtaccagcagggccacgctccctctgaaggctccagagaagggtcattccttcctcttccatggccttggtggctcccaggagtccttggcattccttggcttgcagccacactcctcccatcttgcctctgtcttcacctggatgtcttttccctgtgtctctttcttcttatgacaccggtcatactggattaatggcctgccctatattagtataacctcatcttaatgagtgatatctgcaatgaccacatttccaagtaagggcatgatctgaggtactggtggttcagacctcaacctgtctttgggggacagaattcaacccataacagcatggtttacagtagaaggtgagcatgaggcatgccctgtcccctctctcattcttcctccaccatttccctcctgcaatgaaaacccgcatcctggctgggcacagtggttcacacctgtaatcccaatactttgggaggctaaggcaggcggatcacctaaggtcaggagttcaagaccagcctggccaacatggtgaaaccctgtctctacaaaaatacaaaaattagccaggcatgatgatgggcacctgttatcccagctacttgggaggctgaggcaggaggagaatggcttgaacagcccgggaggcggaggttgcagtgagccaagatcgtgccacttactccagcctggatgacagagctccacctcaagaaagaaacaaaaagaaagaaagaaagagagacagagagaaagaaagggaaagagagagaggaaggaaggaaggaaggagagaaagaaagagaaagaaagaaagagagaaagaagaaagaaagaaaaagaaagaaagaaaaagaaaggaagaaagaaaaagaaaggaaggaaggaagaaagaaagaaagaaagaaagaaagaaagaaagaaagaaagagaaagaaagggaaaagaaggaaggaaaagagaggggaaggaaggaaggcaggcaggcaaagaaagaaagaagagagagagagagaaaggaaagaaggaaagaaggaaggaagggagggagggaggaaggaaggaagggagggaggaagggaggagaggggaggggagggaaggggagagaaaagaccgcataccaggccaggtgcggtggctcacgcttgtaatcccagcaatttggaaggccaaggcaggcgtatcgcctgaggtcagcagttccaaaccagcctgtccaacatggtgaagttctctactaagaatacaaaaattagccaggcgtggtggcgtgcacctgtagtcccagctgctccagaggctgaggcaggagaattgcttgaacctgggaggcagaggctgcaatgcgccaagatcccgccactgcactccagcctgggcgacagagtgagactccgtctccgggagcccacggcattgagcaaacctcggcattatttgcagcaagagcctctggcatccaaatagcaaccaacaccacgcctctgtagtgtgctgcgcagcctccacactccagtctgaggctccctgtttgagtcccgccctatgcccagctgaggttatagcacgctcacctccagaagaggtaacccaagctctttactctactggagatcacctctgtccccactctgggcgcttctcccagctgacagaaaatacctccagctgatgtcagaaaatacagggctggaggctggcgtacaaagtcagtccccacaggcctatggtggcccataagccacgtcta[136 bp omitted]catggcaaaaccccgtctctactaaaaatacaaaaagaaaaaatagccgggcctgatgtcgcgcacctgtaatcccagctactccgggagactgaggcgggagtatagcttgaacccgggaagcaaaggttgcagtgaggcgagatcgcaccactgcactccaggctgggcgacagagtgagactctgtctgaaaaaaaaaaaaagtgcaggtacccctctccagctctcccctccctacacatccctcaaaccgtcccgctgtaatgcacccgccctgttccttggtaacttgaagctgcttatagaatgtggagatgggggtaattgaaaggtcggcccaggccacagagcccctgagctctgctaccggcaaccccagctgcactccccactctctgtcaccaggagctgccgggtgcctgggatatcctggcagctctgctcaaaatgatctacgacttcatgaatttatttggctcctcctcggggccagggtgagtgtcatgggttaataaggccggccccgccttcaggagcggtccactgggagatgtgtgctgcgcagccctcttgcgaaagctctcccctggtgggacattctgggcacaaccaacaggccgggggaaatgagaggtgatccatactaaagggtcaaagtccccgcaccaggcagaggccccaaaacaccgcagcgtacatgtgctgcaaggcgagtacgggttggtaaacaaaactatattcagatgagctcgggccgggtgacttaacagatgaggaagtgtctcggggccatcggcggaggcgcagcccaggggtccccagctccccgcctcgccacctggggacagcccacggcccggggctcgggcgccgcctgctgtcgcggtgcgcagcgactacgggaactcttccgcagcagacggggtccccgcggcccgctcccccaggggcaagcaagcgaccacaggggaccggtcccggggctggatgtggctcatgtccgaagcgcacggagccgagccggtgttgctcagggaggctgcccgccccttcacgcagaccctgcggctctgcgtgccctcagggaacagcaaggtccgagccggtgtcgtcgagggggcgacgggacggagggaggagcctgaggggtcccggtcgagggaggggaggagtgggcggggcgggggtggggccgttcctgcgctctccttcgcctgcgggccggcactgctcacctctcgtccagggacatgacgggcacgccaggcgccgttgccacccgggatggcgaggcccccgagcgctccccgccctgcagtccgagctacgacctcacgggcaaggtgggtgggcctcttccgtgagacccccgccctcctcggcgctagccccttcctggctgcgtctgggttggactcagcccttcccccaggcagctgcgtctcccagaggagggagggagagagggtcaggacacagcctctggggccgtcccaagctctaggtgtctctgctggcttggtgggggcgggtcgcggaagatcgcaaaaactgagtgatccccccgccggccccaactcagttctcttctgccacactctggcaaatatgagcccccgggagcccatgcttcttggtgagggttaagcgcgcaactctcggggctcaggctgggaagggctgggagatggggaccgaacggagactcggagaggacgtcccctgctggcagaggaactggcgttaatgccattttccgagctaagctcttagttgagatctgacatccaggtttaaggcctgatgtcccccagctgctcccctcccattccacccgctggaggcactgcctcccaccttcctccctgcagtcggaagccgctcctcccagaaggatgttgccagccggcctgcaggtcacttgggaatttttcgaacctgagaaagatttcagtggttggtctttcgcatcccgcacttgagagagctccagggctgctctctggggcttgctccctctacaggggtgtcctgtatggaaacaggtagggacagcagtggactggtctgtcgccttccatctgtgtccttggagtgagcgggtaccagaaactgaaagaactgctgagggagcctagagcttccactcttcctctgcagggttggggatggagtgagggctgtcctggattccgctgcatggccttgaaggagacctgcctctctctgggcctcggtttcctccccgacaccagggctcacccttgctgggagcctcagcctccaccccagtgtttcgggggaagccaccctgcaagtcatccgcccagagccgttgagataggcgtcctgtgtgggcttgtggcaggaaatgggcccctgcaccctcggagaggaggagctgctgttggccaggccccaggctgagggggactgcctgaccttgttgccctgcaaaccagctgggttgtttgcctaggaggtggccaggctaggcagctgtttgtgtttggtggaatcaccgagctgggtgggtagctggcatcgtttgctcaaggcagctgtgatctgtaaagtacacaaagactggccctccctccctccttcctgctccagggctgggacccaggagccagggaggagtgcaggctccagaaagctcctatcccccaccccttcatctgttccctggccaagcggcattggccggagagttggtccccagcctccccgggcctgccccaggggagtgagtccaggaccctctgagaaagcctggcaggagctccttggaccagactaggggtgatgtggcccacaggcagacagttcccaccctgggccactcttccctgggtcttaggtgattcaccacgatgatgggccctagccattaacagactctagaaatacctcaaagacattatccctcctccttctacccactatggaaaccatgccacagaaaggttaaggaatcttcctaaagtcacacagtaggccatttacaaatcaagacccatccttcataccccttctgctcagccacccctgcctctccaccagagttaactaatgccagtaccccatgcccacaacaggaatgcctttgggctccactgtcaatttcagagcctcaaaaataattcaaacctagtccctgcttaacccattaagccacctaaccagcagctgggaaattccagcattggatctagacccctgttatccaagattggagaacagtgggacaaagtgctcctctccaccattcctgcgtgtccctggggaagatgagcagagcagagccagacagtaaaggagagggccacgccccctccacaggttacctccttggtactcctgcccgcactacccacagcaaccccgggatgccgatctgcagccacatgtcccatgtgggaggtttctgctgaaagaacttccaactac[132 bp omitted]caacctctacctcctgggttcaagctattctcctgtctccgcctcccaagtaactgggactacaggcgtgtgccaccactcctggctagttttttgtatttttagtagagatggggtttcaccttgttggtcaggctggtctcaaactcccaacctcaggtgatccgtccaccttgggcacccaaaatgctaggattacacacatgagctactgcacccggcctcatgcaaccttttaataaacataaaatgtcattagaaacttccagtcaggcgcggtggctcacgcccgtaatcccagcactttgggaggctgaggcgggcggatcacctgaggtcgggagttcaagaccagcctggccaacatggagaaaccccgtctctactaaaaataaaaaattagccaggcgaggtggtgcatgcctataatcccagctactcaggaggctgaggcaggagaatcatttaaacctgggaggtggaggttgtggtgagccaagatctcgccattgcactccagcctgggcaacaagagcaaaactccatctcaaaaaaaaaaagaaagaaagaaagaaagaaacttccaaataaatgttgtgacacaaaaaaaaaaacccaaacaatattcattatagagtatgcaaatgaccatgccccacccccagcagattctgatagactcccttgggtgggaatccttgtccaatatattgacacttccctttcctgtcagtatagcccagcccatgcgtgtactcacgagcggacgatggatgacacaagtacacagagggacggaatccctgcatggtgtggctatgggcaaatgtggccactgtctagattgtgcaaatgtggtggttctctggggccacagagcacacttggggacctgttcatggtgaggtctcaactccggcctctaggaacttgaatgaggacaggagggtcagagggagagcctaggaggctgagccaaggagcgtggagaggagagacagggtgaagatggcggctggctttctggaagcaggtggcctttggtgcggtcagcattcgtgccagccccctcttctctgatcctctccatgtgtctctctcctggaatcccagaagctgcccctgactccccattaactgcctctgcccctaccccctaggtgatgcttctgggagacacaggcgtcggcaaaacatgtttcctgatccaattcaaagacggggccttcctgtccggaaccttcatagccaccgtcggcatagacttcagggtgaggtggctgcaggcacttgcttccagcagagagccagggctgtggctcaggcatgggggggttgcccccaccttgctcaccctggctcccagggactcccgaggctcatgcctggagggcacacaacccgctcccccaagaccacagaggtggccgggtcaaaggagactgggcaaggttggctccttgcccaactataggatgcaaaaaaatgagactgagtcttcgattccagctccattcctgggggacttctcccaagcagagcagccgcaggcacggcataagctgaatatcttggcccacagagcccctgctcattgctctcctacctgggcccctttggaaaggcctcaaaggtcaatcagtctttctggagttcccagaaagcacagccctgcactgggtttaagagctgggcttgggccgggcatggtggctcttgcctgtattcccagcactttgggaggc[134 bp omitted]gaggcaggagaatcgctcaaatccgggtggtggaggttgcagtgagctgagatcgcgccactgcactccagcctgggcaacaaagtgagactgcgtctcagaaaaaaaaaaaaaaaagagctgggctggccatgttgggagacagcagctcaccagggaccctccctctcaccttgacgactccatcttacaaatctgcatcagggatgctagacgctgcacacctgaagtgttcaatagagaaaaggtctcaccctggcaggtggggctctacagcttcaagcaggcagaaagcgaacacttccttcactagagaattagtgggcagctaaagaaaaggtgctgctgcagatgtagcctcaggtccccaggatgcaggcaaacaccccatctccaggggctcggtcacagtcccaaggctaggctccaggagagggagaccgaagtgggaaaagggcagggcctccagcagcaaccagccctccagccctgggctgcctgatccctggagagagccaggatgtttctcaggctcctcttgccctgctgttgtgagaaggcagttacagtcctcagaagggacgactccacagtggaggtgtctgggtatggggttcctgctgccctgatggtatgatctggctggagacggttctggggctcactgcacccactctaggcctggagagggaacaagacaggacgtctgcagagctgaggagccacatgactcctgccctcccatcctctgcctttttctctttcagaacaaggtggtgactgtggatggcgtgagagtgaagctgcaggtgagaccagaggctggagttggggagggaggatggaggacctgcccttccttctcaccctgaaccacaggaggcctgcagccctgccctccgcctggggcaatttcctgtggggcccacgggaggaaatggcttttgtttatttgacatctgcagaaaaagcagttcccaggcaccctctcatctatgaacagcagctccaaatgccttcagacaagcttagcctccatccatctcctccccagttgccagggctttatctgctcttaggagattggacatccccaacccctgagctagggga[137 bp omitted]tgcctc[211 bp omitted]atcagtaactgctactgtccaggtcattggatgctcaggggctcatgagaacctaaagaagaaaacagccccaccttcccacagatatctcatacaacaaagcaggcctgctccacccagcacattccttgcacctgcctccttctgaccatttctccatcccatcccttcccagatctgggacaccgctgggcaggaacggttccgaagcgtcacccatgcttattacagagatgctcagggtgagtccctcgcaccctccaacccctaccccagccccttggtagcatccgtgctgctgcctaagtcccctctgtgatcctctcccctccagccttgcttctgctgtatgacatcaccaacaaatcttctttcgacaacatcagggtaggtcctcccttcccctgactcccacccataagcagccaaggcaaggtctatgcaggctggggttgcttcctgccctgtggaaagcgggtggagcgtggagtcctcctgccttctgaaaaacacctacttgtgactcagaagtcatatctgctgctttgtatttggtggccatgtgggcatgaaggccaagcaggctgttgtgaccctgtgccacctgcatagccctcactgtgattcacgagtgtgtttcgtgacaaagtgttcagaacagcccccactccaccctggataattatccacagagaccaagggaaaaacacaaccagaaaagtccacacatacatccagggcaagttgcaagaaagtgactcagtcagacagagtgagtggttgtatcctcacaaccaaactattatagagacaaaaatttgataaattcaagcaccaattttgttcacgacattgtataggtttcatgaatcccctgacctcaaggacagtttgctgataagcaaactaggagaataaaacgtttatatagaaagaggaaaatccatggcactcatactcctacctccaaccccatgctcatggcagacatcactaatcaatcacagtacttttgatcactgaaacccttatgtggtcttagaatctttaacaggacactccaagaaatcactgctgacagccaactgatttgtgagataaggtctccatgcatctggatcttccatagaactgatagttgcacagcataaaatggtgagggtggggccattgtgggttgagccaccaaggaaggccatccaggcctggatgggccagaacaaaggtacagatgagagaacgcacagggtatcgtgttcaaggtagtgagtaactgaggatagtcaaacggagcagaagaagaaaggggcagcaggaggaagagaatgccagtctcgcacgccctctcccacaggcctggctcactgagattcatgagtatgcccagagggacgtggtgatcatgctgctaggcaacaaggtgagtggctccggggcagggtcagcccagccctgcacttcctcagccctagccggccccataaccacccaagaacagttatctaggcatccttcctgaaaaggactctgcagcctccagctcaggggtcagacatatctggaggcttctgcccatcccatctgccccttccagggaaagtccaagttgttgcctgagaaatcaaggggtgcccagttctcagcccccattagagcagagtgaacagggtcccaggtcaggggctaagagtgcaaagggttagccccaactgctgtcctattccaagaccctttaccaaaggtgagatcccagagctgggagctacactgggcagaaaccctggccccaggccaatcacacctgcctgcagtcccttgggccaccagcagagggcaggcaacgcctgcttctggggcaaaatatgggcccgctggggcggaggcctccttccccagagtgacccatttgggcttgacaggcggatatgagcagcgaaagagtgatccgttccgaagacggagagaccttggccagggtaagtgattgtctgtgggacagggtgaagggtgggggcaacccgacgctggccctgaggacactctctcccgggcaggagtacggtgttcccttcctggagaccagcgccaagactggcatgaatgtggagttagcctttctggccatcgccaagtgagagctgggcagggaagggaagtgtgcggggcagggcggcacactccaggaatccagtagggcccggcccctggcccagcccctggacacacctgcattctgcaggctgaggtccatttgctctgggagcactgggccactgggagaggggagggggcggctcagctcctcaccccagcccagcccagcccagcccagcccattgtctcttcttcaagggaactgaaataccgggccgggcatcaggcggatgagcccagcttccagatccgagactatgtagagtcccagaagaagcgctccagctgctgctccttcatgtgaatcccagggggcagagaggaggctctggaggcacacaggatgcagccttccccctcccaggcctggcttattccaagaggctgagccaatggggagaaagatggaggactcactgcacagccgcttcctagcagggagctatactccaactcctacttgagttcctgcggtctccccgcatccacagggagggtaaaacacttagcttttattttaatagtacataatttaataccaaaaaaggcgcctggatccccaaaaaaccgaggctgggagctagtggcccttttgctttctaggacttggggggccggccctccctcctaagcataacaaaggtggtgttgctccagctcagccccaggggacacagatgcactttgggggtgagggcaggtaatgactccatcgcaccctcagttcagctggacagaggctcaggtgaccccagccttcactgtctcccgctctccaggagcttatcttcgccccatctcccaaataagtgggcccttgtgctgtgaggaagaccaaagcctcagggaagataagagatatggagatgggagggggaggacaaggggcagagagtagggtctagctggctatctctggccttactaacacccccctggaggcatgccccttttctccagcacacaagcacattggggcacctggaaatattggttccaggctcctgttctctggacttcagatcctgggggagcccctcccccccctgaatccctggcttagctaccttcctgcctgtgcacctaaaaacctcaggtcagaactaggaaaagagttttgtttttatttttttgaaatggagtctcgttctgtcgcccaggctgaggtgcagtagtgcaatctccgctcactacaacctccactccctggggctcaagcgatcctcccacctcagccgccgaagtagctgggactataggtgtgtaccatcacacctggctaatttttgtattttttgtagacacagggtttcgccatgttgcccaggctggtcttgaattcctgagctcaagcaacctgccggcctcggcctcccaaagtactgggattacacgcagaaggcaccatgcccaggctagatgtgtcttatcccaatcctttggcaggcatgcagctccacaggcgatttcttcaagcagctgaagtgtttagccctcctgggttaagagccagataaggagaaatccctttcctaggtttggaatgtgttgtgaaaaaaaagagaaatccctggctcctggagctggtgggagacaagattaagcaaacctcccctgacatgtatccctttgaccccaagctctgcctcctccctgaccacccatgccctttcctttaacttctcaaacagataccagggcctaaactgctttacctcccctcctactgagtcaggttaggtggtgggaggtcacccatttccgagttaaaccaatgcaatatgagtaaaacaaagtcatgtgggtatgtctggggtagagagaggggtagcaagttcatgtgtcctccttggtcacatatctcccaaagctccgatccctgccatgggaagtggacaggaaacatgaggtcatgacctgcaggcatctttactgcagctctgccggcctggagggggagagggggaggaagaagtatgcgctgcacatttctgaggctactgcatttgctttcaaggcagaaatcttgctctgagcagtcagcggctccagtttgggcccgataaggaagttctccgtggcctccctcaggcagagcagggaggaggctgacattgccagtctcttctggggcccaaggcaggttgcaggagatccaatcccatagacagctctgggcctcttgcatttgagtttttcagaattaaactgcagtattttggaaagcacatcctgtccactgtttctttgaagtgagtggggggggggggtcttgttgaaggaattgtcattcactgccaaaatcattccatcctccttcctcagtgtctgtcctcagatggtcagctccccgctcaacagactgtctcccgcctctgtgaccagcctctctttggcaagagggagctagaaggctttacagtcctaatcatttttctgttggaaaaaaaaaaaaaaaaccaaggctcctttccctgtggcgtgtacccagaggttgattacctgagtctgtcctgcctctccccaccccacctccctagccaaacgctgctgccaaagcccacgctattgccctagatggcctgtcttcagcgggctgcccctcgaggtcccaggctctccgcggagccctcaccttcccagcagggatcagaacctgcactcctctatgcgagtcctgggacagcacaaagtggattagggttagggttcccacaaacggaaaaatgttattcaaacaactctgtagggtccgaggaggccctccgtcttaattctcgagactgaccggccctcgctgccccgagcgggagcagttgccccggcaacagccgctccctctcaactggagctgcacccaggctttggctaaaggctgttaaaacgttggccaggtgcggtggctcacgtctgtaatcccagggcggatcacctgaggtcaggagtttgaaaccatcctggccaacatggcgaaatttcgtctctactaaaaatacaaaaattagcggggcgtggtggtgcgcgcctgtaaccccagctgctcgggaggctgaggcaggggaatcgcttgaacccgggaggcggaggttgcagtgatccgagatcgcgccacggcagtccagcctgggcgacagagcgagactccgtctcaaaaaaaaaaaaaaaagttagggtcctttacccgagggccggctttcctcactccccgccacaggtaggggaaaccaggccggagccggcgggcccacccgcccagaaccgggaattcggcgagccccgcccctgccaccccagcgccggccgctcggtaacaaacacttccacttcctgagcgctagtcttcgcccgccgcggggcgccgcgccgagcgcaggccccgccccgcgcgttcccaatggccggcgccgttcacccggccggagcgcccaggcctgcagccccctattggcccgcggaggtccccaccctcagcgcggccccgcccccggggtaaggagccggggcggactctgggacgctcagacgccgcgcggggcggggattggtctgtggtcctctctcggctcctcgcggctcgcggcggccgacggttcctgggacacctgcttgcttggcccgtccggcggctcagggcttctctgctgcgctcccggttcgctggacgggaagaagggctgggccgtcccgtcccgtccccatcggaaccccaagtcgcgccgctgacccgtcgcagggcgagatgagcgcggacgcagcggccggggcgcccctgccccggctctgctgcctggagaagggtccgaacggctacggcttccacctgcacggggagaagggcaagttgggccagtacatccggctggtggagcccggctcgccggccgagaaggcggggctgctggcgggggaccggctggtggaggtgaacggcgaaaacgtggagaaggagacccaccagcaggtggtgagccgcatccgcgccgcactcaacgccgtgcgcctgctggtggtcgaccccgagacggacgagcagctgcagaagctcggcgtccaggtccgagaggagctgctgcgcgcccaggaagcgccggggcaggccgagccgccggccgccgccgaggtgcagggggctggcaacgaaaatgagcctcgcgaggccgacaagagccacccggagcaggtaagcggggcccaagccgcgcaggctggcatggagtgggaggaggatccggagagacccaggtgccccggccgtccagccccgcgcccgccgtcgtttttctgaaactcgagctgcgagggggagaccgcttccgcccgccgaccaggcgccctgacacatcctaggcaggcctggggctgcgtcccgcgacctcctctccttcccaggctgtgctgggagcttgagcgcctttgccgcctgcacctcttgttccctggcctttgggagggcggcgcaggggaacccagcccccttccctcgggtctgtgggtgtctgctcccgttcctcggaatcccccaatcctgctccttccctggtgccctctcctcgttcaccccagtccgcagatgggccggggagaaagggctctccgccccagaggtgccagcttcgcccgccactcctacttcaaaagctagaggaatagcattactcctcctgtgtggagccccggcgcgaggaggccctctccgcagcccgccggtgtgtgtcctgaacttcagtcctgctggacttcatcctcccggagtcctgtgtgacttctaagggagaggaagccccaccatctcagggcggtgtgggggttgcctggcagggaggaggagccaaggcatctcggagtggtggttctgccacctcagaggatttacgattctcaggaatgtgaagagtaagcgcctagaactgtatctgggagggaaggggaaagaccttggaagaagaaaaagatggccatggggaggagagagagctcctggggctcacggccctgtgtgcgccagcggagctcacggtgagccggtggtcttgccctggccttgccatggtcactctggtgcccacacagccagcaggccggttgctttttgcccatgtttggtgtttgcccatgggatcccagtttggatcagctgcaagaggggcagctggcaaaataggagttgtgctgagcctcctgtccccagagagtggagtggtgcattgtgtagggcagggcgtgagcctcccaggaccccttcagcttgcaccaccagctctccctggtggcagtgtctgatgggagtgtccgtggggctacgaggagcctcctggacagagaaagggcacagttcggcattaaggtagaaggcaaagccctagaggatcaactggtttggtggaagtgaggtcaccagaagccctgtccagccagagctgggtgctgggaatgccagggccaccaggctcccacttcctgcccctgccaagctggcattggcaaggggagggggaagggatctgagcacccggagcaaggaggttgatgccagggagttggggccgatgatctccagtcccaggcagaaatccagtgtgaactttgtgctgagtccatcgatcgatttgacattcttttttttttttttttttggactttggcacccacacaaatacccacccacccccaccccccacaagttgcagtctcgttcagctcctccctttgcccttttggttatgctgctgggtgccagagggcctgggaggcgaacgtggaggcctggcatagcacacgtgcgcaaaggcagcagctttgagcttcctgggtgagcacagactcagattcctgcatgttttggagggacacctacatttgtgtgtactttgttaggccaggagatgagaggagagccaccagcaaatcctggggacaccatcaccagccaagtcccaggacttctgagttctggttctcccatctgtgagatggaggcattgggcgatgtgatgcctgccttctctagaattatagaaatgacgtgaagcacttgagccccttactaaatgctgaactgcactccttcatgcctggcgtttgaatcccagctcctctaaactgactcctagtcaacaccattgagtccttctagcagaaaatcctctcctctcaatcctgtgtgttgagcatacagacacccatgtggttattagaaaaaatgttaacagacattgtaagagttcgtttttctaaaacacacccgtttcctacataaagcatcaaatggaggtttgccaattcgttttagtctgaatttgtgtgcaaggtggggctgttcccttgtcttcattagccctccacttactaagtgatgatatcagtggaaaagtgtggcgcagagagtggttggctgggtggcctctggctgggaagaccagctgtgtccagaaccactcagggcagaggctgaggggtgcctgtaacactggccatccccgctggggagtctaggcctaaggaggtggaagtggctctccagctctgcccaccggctttgctttgtggatggccttccccgcctgccccgtggggagagaggagcagcaagacccgccctgctgttcccctgcttaaagccctcctccccccattcaccaccagtcacaggatgaggcctaaacccttgagtctgggttcagagtgccggccgggcagagccgagccagctcagctgtactagccaggctgtgcgaagccaagttacctcacctctgtaagcctccatttcctcttgtgtaagttgggggttatggcagctacctcggaattgcatgaggctgtgtgtaaagcacgtagctcagtgcctggcactgagtccaggctcagccagcctttgcagttggtattggaatgaatacatatttcatagtgatcattgcacacctatcatggggcagctagcgctgggtcagcctgcctagttgggcaaatgccactgtggccaagcctggcacacagtcagtgcctgatcgatggtcactgtgggttaagaatgatacgttgtggccaggtgtggtggctcacacctgtaatcccagcactttgggaggccaaagtgggaggatcgcctgagcccaggagtttgagaccagcctaggcaacatgacaagaccctgtctctattaaattttttcttttttttttttaagagttatatgctgttccatggcccttctccatctggcagcctgttctcaccactgcctccctacccccaaaaccacacccagggtccgaattcccctctagcctctaagccttcacaccctgacacttctgtcccctcccagggagcctgtccttaatccagtaggcagagttagcatttcctttccttcactttttttgtttttgtttttgtttttgttttttttgagacagattccacccaggctggagtggtgtcgcaacctcgcctcgctgcagcctcgacctccagggctcaatcgatcctcccacctcattctccctagtagctgggactacaggcatgcaccactattcccagctaatttttaaattctttgtagagatggagtttcaccgtgttgcccaggctggtcttgaactcctgggctgaggtgatctgccagcctcggcctccgcctcctctttgtccttacatcttttatcgctctaaacacacaatattttaatcatctgtttgtgacctttttctccactacgtggtaagcccaagggcatcaactgtggcctatttgtgtttctatccccagcgctgtccttggcacatggtagggaggctctcaaaaacagtttttgaattaatgaatgaatatataacaacagtcagggacctttgtcctcattcagctcatcccgccccgcccagagattggaattccagatagaacctacccactcttctttcttgcctgctagcagcttctatttgaaaactagaaagccaaaagtccaggctttggggtcagccagatcagtgtttgaatcccagctctgccgtgtgctggttctgggatcctgggagttcatttttccctgcaaccctcagcctccacctctgtgaaaggcactgcctgcagggttattgggaagatttggtggcatgacaggtttgtaaatgaaagtgctagtttggggtgtttcctgccagccctgaccctgatcccagagtcagagtgcaggcaccccagggagcaaggtgggtggtggggcacagttagctggagggccatcaacctctttcccagggcgggcgggccattttacaccaaccaagttggagctctggtagggcagaacagagcttgagctgctgggtgtttggatttgaaatggacagggtatgtgattgtttgtgtgttgggatctctttctttgctggcaaaacagtgtagcccctggttcttaccttcaagctcctgttaactcagtaattctggagatgattctcttggagatagatgggggcttcctggccgggcgcagtgacttgtgcctgtaatcccatcacttcgggaggctgaggcgggaggatcgcttaagcccaggagtttgagaccagcctgggcaacatagtgagacctcgtctctaccaaaaaaacagggggaggggggtgaatgggggcttccttctcaaggaactccatatgtctagatggggtccttctcccctttcccagatgtcccatctcaat[154 bp omitted]ggtaaaaacccatctctactaaaaatacaaaaattagcgaggcgtggtggcaggtgcctgtaatcccagctactcgggagtctgaggcaggagaatggcttgaacctgggaggtggaggtttcagtgagccgagatcgcgccactgcactccagcccgagcagcagagtgagactcatctccaaaataaaaaaaaaagaaagaagaagctcagccgaggtcttgttggtgctgcaggactctttacagggagaaaccagagctctagaccccaataacaaatgttcctctgttttcgttgctctaagatagagtggccctacctggaaggaaacaggtttgtacagtgcctttaggcactctacctatgacataaagatgttgacatgcatttctttctttctttctttctttctttcttttttttttttttttttttcctgagacagtcttgctctgttgcccaggctggagtgcagtggtgtgatctcggctcactgcaacctccgtctctcaagttcaagcaattgtcctgcctcagccttccatgtagctaggattacaaacacccgccaccacaccctgctaatttttgtatttttagtagagacggagtttcaccacggtggccaggctgggtggcacctgtcacaacaccctgctaatttttgtatttttagtagagatggggtttcaccacattggccaggctggtttcaaactcctgacctcaggtaatccacctgcctcggtctcccaaagtgctgggattataggcatgagccaccacacccagccaatatgcatttcattgtcccccagacaaattagctattgttttctctattttgtaggttgacagtaagtgttcaatacatgatagctactatttgtgtctagcactgtgctaagtactaaccttgcctgtctcatttaatccacatgaccaccagtgaggcagatattggccccattctctgcctatggaggctgaggcttgatcagttaaggtggccatggcgggtcccaggactctgagctagcgactcctcccacacagcgcaggggtgtgtcttggaacccaaccctctgactctagtgcctgcacagccatttggccacatgagtaggctgtgcttgaagcctgactctgccaggtgtttctgcccatcatattctgagccacagctggaccatcacagtggtataaattcaggctgcttgaactggcttcctgtaaggatccagggcttccaggtgctcctgtccctagcagggcatccttgcagtgcctcagcccataagtggcaggctcctgtccccatcccttctcacgtgatgtgataggtcaatctggaatctggtaaccaagtatctacccccgccctcactccccagaacctgcacagagagcccccctcaagggtggtcttcactgttgaccgaagccttcccctcatggtaggacaactcaccatgtccccagactcctaggcaatgtttaggtccctaggccctagaaaaggacaagagttacagattccctgaggtccaggtcacctcggggtggtgtgggaacacacagagaatgctggccaggttcaagtcccactcactgctgggtgctgagagctctgaattctccgagacaggctgcagcctctccctgtgctaaggtcaggggaacagcaatggccaggggtatttagaggagtgtgtttggggcagtctcaggcagcacaggtctgtgctgtccgggcagcagccaccagcttcgcgaggctcccgggcactcgagatgtgctggtccacatgcagacgtgctgtgtgtgcaaaatgcacaccagattttgaagccattgtacaaataaaaggatgtacaatagctcaattgttaaaaatggattacacattgaaatgataatattttgggtacattatgttaaataaaatattcaattctactatttttcctgttttttttttttttggaggcagagtctcgctctgttgcccaggctggagtgcagtggtgcgatctcggctcactgcaagctccacctcccaggttcaagcgattctcctgcctcagcctcccaagtagctgtgcaccaccacgcccagctgatttttgtatttttcttttttagtagagatagggtttcaccatgttgaccaggctggtctcaaactcctgtgctcaagtgatccacttgcctcgtcctcccaaaatgctgggattacaggcatgagccaccacacctggcctatttttcttttctttctttctttctttttttttttttttttttttttgagacggagccttgctctatcacccaggctggagtgcagtggcgtgatctcggctcactgcaacctccgcctcctgggttcaagcggttctcgtgcctcagcctctggagtagctgggaccacaggtgtgcaccaccacatatgtctaattttcatatttttagttgagacagggtttcaccatgttggccatgctggtcttgaactcccgacctcaggtgatccacctgccttggcctcccaaaatgctgggattacaagtgtgagccactgcacccggcctatttttcctttttcaaatgtgatgactagaaaatcttacattccacacatggctggcattatatatctactggacagtgctgctctggatctgagctcaaatcctgcctttgcccgtcagccatgtgtacttgagcaactgactccagctttttgaagctgggtttccttttctgtgaaatgctggcaataatactttccttttaggactataattggctcttaagaagaaaacacatgtaaagagctcggtgcctaacacatagtaggtgttcagtaaatagcagctgctatttgttacttcagtgttgagccccaatttcacaagctccttgaaggttcttaatagccccttgggacaacccctgggggttaaatctagagacttctgggaggagggtgagggatgaggaaggatgcagcagggaaggcatggggcggccagccctggatggtgtccagccgggctgcagcccaggtaccagcctgctccatcccaggcttgcccagccctgcagagacctgagccagactctgccccctcttgcccccgtgggtctccatggctggcacagggagaagaggttactagccagaaggagaacctgtttcagacctctgagtcctgggggtgtctgtcagaccagcagacctcactttagtttgtgtctccctcctggttcccaccctaccagactccagggaaagctcttcccactgagaaataggaaggaagagatcaagggctaggagcagtgagtgactttttttaaaatggacacatccaacattcccctgccgcccgcacagacctggagggatgtggagggtggaagggggtcccatagagtaaaatgaggtgacatcagggccactacgcagggggccagtgacagccaagccccctgtacctcacctagggtaaggagaagacaccttctgcctagaggtgtggacactggctgagtgcctggagcccctggtcacttcccagtgcccccaggctgcccgtcacacagcactccaggcagggccagctgtctccatcctggcttccttgaagagctggcaccaggcccagccctgtctccagaatctggggaacaaactgagctgtctcccagagcaaatatggctcttacacccaacatactcctgacacacacaccccagcccctgagaacagccagggttccttcctgcccccgccgtcctgcccccttccatcctcttgttggggctgattttcctgtattgggcatggggcactggtcttctttgcataaacaagagccctgggctgggggaggggcagtcttgagaggtggggttacctctgttgttcccctggacacccaagtggtcttcctactcctccagcccctttcctctggggtcctgagctagctggctcgaaggaagcgggctgggctgtttctgtagggcccatcaccatggcatcagccagggaggggctgggcccaatggggcgttggcccccaggctcccacagccttccctgaagggaggaaggaggagcagggagcggccctgggcctgttccccagagacggtcactgggattagggtatcgactttccccagctttccaggtgactgctggtggcgcctattgaattccgtgcccgccatccgctccctggactgcgtgggtggaggtgatggggcggccacttagggcgcggtgaagctccctgggggaaaggacagatgaagggaggaagcctgagggtggaggaggccccgggagaagggtgtgggggcagctctccgggcagggtcttttctggaaagccagccagcattttgtgaaagtgagagtctccagcctgtccagccctgggtcaccccggcccagctgcgctgcccatcggctgcatggcctcatgttccctcctgttgattctggctctctgccagtctcctctctgagcagatcctgattttgtcttgaacttgggtctcccaggctgtcgtcgtcactggaggtcccactttgccctccggaactcactggggctatgttccttttgagtctcctcctcccaccatgcttcggacccctctgtagctggctcctcctaagatcctgggggccacacaccaagcccaacatgcctggacgtcactcccatttatcccctttccccagaggcagaacccagccctgccccagcttggcggtgagggtccaagagcaatggtggctgagctcggccaggtaccccacacctccccatcttctcctctcagtgctgggcctggagaccacaggccaggccccacagatccccaggggggctgccccaagggactcccctgccagccccagcctccacccaggctgggatgggctggcttgatgggctgactcagcaactggcactgacacctcctggagacagctgggaggctcctgctagggaggggtgaggaggaacaaggctggtctcccttgaagagtgggaaccccccttcccatgtgaggggaggaagtctctagggacttgggaaggaggctctgcaggtgcatcggagctgtctaaatgctggtggggtctaccgggggcttcccatctccttgtccagccaccccctcaggtcctggagccgccacagagccacatctagacagaacagtggagcaggtcccagtgcaggggaaggaaacagagggcacctgagcccctcaggctgggtaccctgtttccccttgaactgcacgacttggtgctggcagagcggagcaaggctcaaagcaggccctggagctttggcaccatatgtcactaggcgaggggcactgggctgaagatcagtaagggaagcccacagcacagagaccagggccagaggatgggcatcccaaaggcagctagcacagccctgccctgccagccggggggggcgcccagagccacctgcccccagtccagccatgcccctgccctgtcacccacaccaggcttcatcccccagctcaggctgcagctccagctgcgagaggccctgagcgcccggaaggaaggctgtggtaggttgtggtttcttcagctcccagcctacctccagcagaggctgcagccgatgccctggagagagcccctgtctgccctctgctgcctgactcctgttgggtcctcacctcccaatgggttgccccattctggacttggatccttaaggagcaccctgcagtgtggtggaaggaggacaggttccaagtcagagaccagggttggagttctggctgtgtgatgtcaggcagtgggctccacatctctgagcctcagtttccccatctcaaaaacagctgacaagccccagtcaggttgttatgggaaggtttttgggagcgcagggacggtggagggaggttggaggaggtcactagagctgccccctgcctgtcctgagatttcaccctccccactttctcagggtgtctggctgaagcagaaagctgcgcctgtcctggtgacggcgactggtcagacttgtttctgctcacctaggcggcccgggggagggcctggctgggagctttgtggagggattagctctaggggagaagagcctcacttactcccggaacaagatcccacagggctgtgggagtgccggggggtgagcctggggcaggtgacagccgaactagctgggagtgggccctgcagtgaggcagggggtgggccagggagaacaaggcaagaggagcttcattcagggttcctgagcctttgtgagccactcacgtttttaccactcacttaaccgtctttgttgttggggtgaggggtcctcgagcctggatttgggtatgaaaacccaggcaagaaagacctgcccaagcctttaaaggaatgcaaagtcatcctctagccacccccagagatcgaaaggctggggattgagtctcctgcagatggtggcggcctcctggggctggcaagttgggacagaggcccataagccctcctgggcgcgccttcccacccctctcggccctctccactcccagctggggatttgggtttcagagcagcctggcacacacacccccaccccaccagaatctcactcccagcttcctatgactattcattagtattcacaacaatgggaaagtctgggtgtgcacagggattttttacagttagaaagtgtttaagtcaatgacctcactgggcctcagcaaccctgggaggcagatggcagtcagaatgatccataaatgacctgccccaggtcacacagctcctaaacaggggagctggaacctggctgggagccttgactatccactgctcattgtctgatgtgctgagtgataacacagggccagcaggctggacagcagccagtggccctgcaccaggcctggaggagggggagagggacagggactcaggcgtagtccttgggcacaggcttcggctgcctacacccatattccctccatcatactgtgtgtccaggcctgcagcttctaagctgagctgcttactttggaccaagcatgttggaaactgttttcagctgagtccaagcactcgaaatctgcgtgtgcccttttagtaggtcacaccctccaggccacagccacactgggctccctttagcccagccctgcttttcccagtcccctccccattcaggctcctctgtttctggggtctctgtgcttccgttgccacctctgcccttgggcagcggtgtcgggggaggaggtcctggaacgcctgaggatggccccgtcttgtccaggtccccttgctgtgctgaacaataagtttttggttatctgctccttctggctcccttttggctgggccattcggcttggtgggggtgagagagagttcgagtatatggaggaaggctttactgtaaacacactgaccagctttcagtaaacacctgcctcttcctcccctgctgcagagaacggggtacaaaggggctgggggtcctcagtcatatgccccaggtccccagccaggctgacgggtgccacactctgccccctctccaggagggccagactgagccaccaatggggagggatagaggcccgatcaacacagcatgtgattcaccttagactgtcagaagggacaggcatgtgagagctaacctggtcctacccctcatttggcagaagaggaaactgaggcttggacagagcagtgttttatccacatcacctaagcagttagctgcggtgctgggtatccacacaagtcttttgagtcctgggccagaaccctctcaaattgctgtgtagggatctaggcaaatttgcatcctcccaaaccttccttggttggggagatggggacaggcagaggacagggaaggcagaacctggggcactgtggaatagccatggaccctcccctgtccctgcagcgcgagcttcggcctcggctctgtaccatgaagaagggccccagtggctatggcttcaacctgcacagcgacaagtccaagccaggccagttcatccggtcagtggacccagactccccggctgaggcttcagggctccgggcccaggatcgcattgtggaggtgatgcttctcgctctcttcctatctgactgcccccaccccctgcagatcagcagcacctggggcagccatcataccatcatgggcttgattagcccacgggcatagccaacctggagctgctggatggatgggtggatgggagggagggagggaagggtggtggatggatagacggaaggacagatggactgactgatggactcttctcttacctccactcccctggactcctccttgccaagcagatacagtgggcagcctgtgattcacccatcgatcagggagatgtctggggccatctccagagcttccctgctgccaggcacacagagtggggtggcagtaacaaaacccctctcctgagttaggcctttatttatttagtttttttttttttaaatggagtctcgctttgttgcccaggctgggggagtgcagtggcacaatcccagctcactgcaacctccgcctcctgggttcaagcgattctcctgcctcagcctcctgagtagctgggattacaggtgcccaccaccacgcctggctaatgtttgcatttttagtagagacaggatttcaccatgttggccaggctggtctcaaactcctgacctcaagtgatctgcccgcctcggcctcccaaagtgctgggattccaggcgtgagccacctcacccggccccgagttaggcttttagactcgtgcattcagggctctggtgctgtgctcctgggagaggaaacgtgaaccaaatgctcaggcaggtcccagaatcacagtcttagaaccttagagctagagatcagctctcccaagacttctcattttacacgtgagaaaaccaaggcccagagaaggaagtcggacagcaagtccttacccaggctgggccccaccccggcctcccagctcgctcccatcccatctctcccagctgtgtttgtttagtctcgtctggatattttcgttggcccttcccatgtatcctgcctccccagctgactgtcaatgggaggacccccagcctagttcaggactctgcagaaatggcgggggtcagtatccccaggttgtgaactgcaaactggctgagaaccaaggtggtcacccctgcccccaacccccctccacttacctgccccagaaccaaggcctgtgtccgtaacgcctccccgaccctgccctgcaggtgaacggggtctgcatggaggggaagcagcatggggacgtggtgtccgccatcagggctggcggggacgagaccaagctgctggtggtggacagggaaactgacgagttcttcaagaaatgcagagtgatcccatctcaggagcacctgaatggtaagccaggtggggccactggccgtcctggggctggagccccccaagtcagggatgtgagccagggctaagactgctgggtcccaggcgaggggtgggcagcttcccggcatgggtgctccctcctcctccttcatgggaggcccagaggtgtgggctgggggagcgggggcctagtgtagggagtggcagtgggtttctgaggacggcttgtgatggggtcagctggcatgaggtcggtgagagagatggacagatcttcttattcccggccaaagctgcagccccaaaggaggcccaagcccccagtcctgtccccaccagcagactttcagggcagtgtcaatgtgaggaaagggttaactccggggaggcctccagcctttgcttggtcagatcagagtccagtgacgggggccggtgcctccccctccctcctctcaggttgtcttggaaactcagccttgctggctctagagagtagtgggtcccccttcaatccctgggcccctgccctccccatcccccaccatcaccctgccaagcctggcgcctccccctgcccaggcccgagccaaacagggcagggctgctgcaccggggcagggaggggttaagcatgctctgctccttggtctggactttctccctgggaagatggctccctggagcgggcaggggtgctcactgggccatactgagggtggaacctcttgggactttgcagtgggtggggcctcctggagactcaaggttgtatgtgtaaaaggagattcacacaaaggtcctgcgactcccatcgccagctgcaagggcccactggggaggccctgtccccttctggcgcaatccaaggcctgaggctcctagaagaggggatggcccctggaagtccctagctggctctgggcatgggaggtggggtaccgccttacccttatctcccaagttcatggaaaccaggtaactcagataatccccttctccactgagggggagactaaggcccagagaagccccagccttcctcctagggatctgatacgaggaagacacagctggaatctggattccactcagctcctgggatactgtcccctgcttcccccaccccttcaccctgcaggtaattggccccctcagacattcctccctcttctgcctgtctctcgggctagaggggctgcagcctctggccaaaggacctgaagagggagaggcctggggacagtcccctccccgcagtccctccaggatggcatcctcaccctttccatagggaggaatgcccccctctccggctgccagggtttcaccctgaccactgtgagctgatggggaggggacagtgagtgaccctgtgtcccagcagcctgtccttgcccggggaaggctgtgggtgtcaaaagggaggagaagatgagagtcaggtatctctggctgtgtcctggactggggacagggaaaagataaccaggaattttaagctaagagttcagaagaagccctacactgaccagtccctggagatggaacagccacccctgaagccatgtgggacccctaccctgagtgagcccagtgaaggtgaccccagacctgtcttctctccctctgacccctccaggtttcccactggctgggggaggggatacccaggacacaccccttgagccttctcgtcccccctcatttcctgattggcaaataggagttgggattattttctctttttttctttttctttttcttttttttgagatggagtcctgctctgtcacccaggctggagtgcagtggtgcgatctcggctcacagcaacatctgcccctagattcaagtgattcttctgcctcagtctcctgagtagccgggactacagccatgcgccaccacgcccagcaaatttttatatttttagtagagatggggtttcactatgttggccaggatggtctcgatctcttgaccttgtgatccgcccacctcggcctcccaaagtactgcgattacaagtgtgagccaccgcgcctggcctttttttttttttttccggacacagtctctgtcacccaggctagagtgcaatggcacaatcttggctcactgcaacctccacctcctgggttcaagcaattctcctgcctcagcctcctgagtagctgggattacaggcgcctgccaccatgcccggctaatttttgtatttttagtagggatagggtttcgccatgttggccaggctggtcttgaactcctgacctcaggtgatccgcctgccacagtctcccaaagtgctggggtcccagtcatgagccaccgagcccagactattttctctttcagttgaggcaggtactaactatagtctggggtgtggttccaattttggtgtcatcatcatcacctgggaagcgtttggaaaatgttgattcttaggcctgcccactaaaccagaatctgtgctgccaaggtccaggaatctgtactttaacaagcttcccacgtaggagttcccaggtaggaattcccaggtaggaattaggcagccatcctcgaatttcatccccatctgagacaatacattttttaaacaccttgtgacccatcagtgcctcataagatcaatttagtagatagagaccagcaggttttttggtttgttttttttgttttgttttgttttgttttgttttgccagagtcttgctgtgttgcccaggctggagtgtagtggcgtgatctcggctcactgcaacctccaccttctgggttcaaacaattttcccacctcagcctcccaagtagctaggattacaggcgtgtgccaccatgcccagctaattttctttttgtcttttttagtagagacggggtttcaccatgttggccaggctggtctcaaactcctaacctcaagtgatccaggtgcctcggcctcccaaagtgctgggattactggtgtgagccactatgcctggcccagacatttttttgttttttttaatgaaatgaaattaaaaatatcaaagaacactgtagtaagggtgttgctttgtgaaacttttatcacacaaaatctttgtgtgtgctgagtcatcaaaatggcaaacgtaggccagacatttgctcacacctgtaatcccaacactttgggaggccaaggtggaaggattgcttggggctaggagtttgagaccatcctgcatgacatggcaaggccccatctctataaaaaaaaaattttttttaaataaataaggcaaatgtattcatggtgggtggtagtcaaaaaagtttgagatgttgacccagggaacaagatctaataatctgcccaaacccaactcctacctcctctccacgctctattccatccccgttctggactcacctctgctctgtcctttgcctaggtcccctgcctgtgcccttcaccaatggggagatacagaaggtaagggcgggtcccctgtctctttggatttcaatccttggggtgcatgagacagatcagaaggtgctgtggttggtaggatagccatctgactaaggccaaaaccccagggtccccagttccagctccttcttcagctccaagctatagaactgccagaaccctcttggcctctgcctggggccaaagctgtcaggagggagcgggctggctgggcccctctgcagcccgccatcctgggtgacaagcccccgcctccaactccccaccatacagaaggggccattcttccccccaagaacagagcttcagtgtctggccacgggcagccgggcccctgctacttctagtctgggttggaagaacaaagcccctcctccccccttccctgggcagaagggaaagggggtgaggcccggggaagagatggtggggctgggcgccagctgaagccatggaggaacccaggaaggggctgggtgccaagctgacgccccagccaaagccttcgctctgggacaggccgactcagtcaggccacagagcaggaactctgcagggtctgcttaaaggttccccttccctaggagctcctgccagggtacttggcaagggggagggcccttggacccagccctcaaccttctttcacctcatctttggatctagaactttccatccaccttcttctttcaaggccctcctttgctgcttcagggttagggtttcaggattcctggggtcaaatcctggcaaacagtcaggtggaccacatgagattcagggagcaccacatgggctccccatgcccccatgtgtccccacattccaagaagcccctccctggtcactggcccaaaaggcaagccagtacctaaaagccacattggagtggcccagggagagggagcggttcagctaatcccatgatggtctgttcccatcccatccctccagcctgagcagtagaaccagcctgccctctgatccccaaaggaatgtaaaaaggagccccagcaggctcaggaggtgggaaccaggggtgggtggccagggcatcagtgctacctcttctcagtctgaggcccctacttccccaggagctccctccctcctcaggaccccctcaccccatcctctgacaacccacaaccctctcctctctgccaggagaacagtcgtgaagccctggcagaggcagccttggagagccccaggccagccctggtgagatccgcctccagtgacaccagcgaggaggtaggccagccatgcggggggtggcaactgggttacaggaagccgattcccaggccccacttgttcctggcacaccagcctgcctttgaggtcacatgctgagccgcattctgttcttgtgacctggcttccctgggcacggccccaacggagccacctcaccaaggctgaggaccagggagcctaatgagggactgactcccaacttcctgcccccacttctctttacagctgaattcccaagacagccccccaaaacaggactccacagcgccctcgtctacctcctcctccgaccccatcctagacttcaacatctccctggccatggccaaagagagggcccaccagaaacgcagcagcaaacgggccccgcagatggactggagcaagaaaaacgaactcttcagcaacctctgagcgccctgctgccacccagtgactggcagggccgagccagcattccaccccacctttttccttctccccaattactcccctgaatcaatgtacaaatcagcacccacatcccctttcttgacaaatgatttttctagagaactatgttcttccctgactttagggaaggtgaatgtgttcccgtcctcccgcagtcagaaaggagactctgcctccctcctcctcactgagtgcctcatcctaccgggtgtccctttgccaccctgcctgggacatcgctggaacctgcaccatgccaggatcatgggaccaggcgagagggcaccctcccttcctcccccatgtgataaatgggtccagggctgatcaaagaactctgactgcagaactgccgctctcagtggacagggcatctgttaccctgagacctgtggcagacacgtcttgttttcatttgatttttgttaagagtgcagtattgcagagtctagaggaatttttgtttccttgattaacatgattttcctggttgttacatccagggcatggcagtggcctcagccttaaacttttgttcctactcccaccctcagcgaactgggcagcacggggagggtttggctacccctgcccatccctgagccaggtaccaccattgtaaggaaacactttcagaaattcagctggttcctccaaacccttcagcctccgtgtgttccttggaagttttgtcctctggccttggaccccttataggtagaaattgagaaatggtaagccaaggtggtctttggctgggagggtggggtacactggagggagggccatcaagggctccctgtgaccccaagcctgggtagctttagctagagggcctagctgcagtcctgtaggaaggaagatgcatgcacccagccgggtattcagcttggtgtggtcagtgtgcctgtgtgctgggctgcaagcaccgattgtgggctggggaccccttgtctaacggggatatttacaaggggaagtgggagctcagaccaacgttctcagaggactctgggaggttcctttaattccagaagcgtggaaagtgtgtcccaggatggagctgggtttggaatgtgaggacttggctttactctttctgcctatagccagtggggtgcagaattcccaggggcaggctgggctggtgccagatcctctatcttatctggccattgtgacctgattggagggcaagtgtccagtgccaggggaaaacaaaccggtccactgagcccggggacatgctgtgtggctagctggggtggaagggactgttcaagggcaaggtgccctgcccccaacaaaagacccaggtccctgatacctttggcacctgaagcctgatctggaggtccaggaaggtggcttgcaagagctaggctgcagagccgggaggttccgggcaggtgctcaggaggaaggtgcccccaggctagtctccacccaacccaaagggacacctctcagaaaataggctcctgggctgaggggaatgagtaaagcaggtagatctggaatcagggagtggacagtgtcccccaggccagtcactatctggccatctcctgctccttgtcagaggaaccatccaaaacccttaccacagcagtgccctgctcagctgacctgcccccaccccacccttgcttctaccctttggcccctgacagattcccctccacaggggtcgtggagggcccctccctatctcacctgctgggtggggaagccctgggggacctttgactcttcattaacctgaagactggtggaaggaatgggtggccccaagggaactctcattgctgaggtacacatggtacgaagggagccacggcaagcaacgcgttcgttttataatgtttgttttatactgaggcatgttttcggttccagttgttcacatgcagtctgctgtgagactccaagatcaagggtgctgggaggccttaggcaagtcaccttacttatctaagactgtttccccacctggaagatgccctacaagcctcctgtggctgtgtttagaaagcatgcccggcctttcttgacagccagccaccccagatgatggcagggcaaggaagactgttaggagtcagagtgctcccctcaggtggaaggaaactgggccaactctactttgtaagccatagggtgccaggtagcccggccaccctgagcctgtgcctccactgcccccgcgtggccagtcaggtgcagctgctcccagagatggagggtgaggaacagacgtgggagcaccagagggacagagctgatggcctgacgctctcttcaggagggcacccccaaggggcctctgcttcctcagtgccccctgagctttatcagcagaggggtgttttccagccacaaggagctgtatctaacactaatgcctttaaactcaagactggctccaggagagaggaggacggacactaggttgaggggccaggccacactcactctggaccacctgttgttcccgggtcaagttcccagggtcacaccagcctgcctctgcaggacaagaggaccaagctgcccttgagtggacactgtgaggctggggctcgtggtagctcttcacatggaccaaacgggaaaatcaggaaagctggtagtgcctggagcttcactcccagccagggcagcacctctggcctctaaggagaaaggcctgtccactcccatccatgttccaggtccccctgcacctccagctcccaccttcatcccgacatctcccatggatccctgccctccattccagcttcctagagtctgggtctgggtttggccgggaggggagaagggaactggccctggccctggagtctgctcagccacaccactagctggagggaggccacagcaagccccgccagagtctgaagggcctcgaaaggtgattcccagcctgggccaggagcactctcccagtgcagggctctggtctttgaagtgtatgggcccaacaccctgctcacacagagtggctgcccacaaggcccagccatcagcagggctctgccgacccatctctgtaaggcttctcttccacgtggctggtctgctccagaagccactgatgctcggactcactcactgtcagtctgagggtcacctcctgaaaaacactgctcgtagccacctacgtgagccagagagaacaaagcctgctaagttacagtattaccaccaccaggcccaccacccaggtctaagccccactctgccccaggacatccttacctgctcaaagtgaagtttctggaacatccggatgcttggttcatttccttgcccaattttagcctcaaacttggtcagacctagcgtggtcactcctcgcagaggagatgagacaggggcaagtaaggaggcgcctgcccccaccctcctgtcccaagctgcagaggaggaaccttcacctgcccccaaccctcacacctgaacaaagttcacctggggcctgcccacttcccgcattgtctgctcacactttcttaccgtaagacagcatcgcgagaacggcctcagtgccaaggcccttacccctgcagctgggctctaggagagacaacaggagcggcgctgacgccgtgtgccaggctccagtgcgggcacttggcagacaccatctcatttaattctcaacaactctgaagttgctactatcattaccattctgcagacgaggaaacaggcacaaagaagtgtgaaaggcctcacagcttgcaacccagcaacctgacttcaaagctgacctctttacctcatggagtcagtatgctgcctcatggggatagtcagtagccacttgggggaaactgaggaccatgaaggagcagaaacaggagggcctcctcctgtaatatgacaacatgctccagagacctttttctgagggtccccagcccaccccaactatgggactaaccatacttgaatctaccccaaaccaagggttaagttcacgcctaagcataaggactaaagtgatgaggctgagggtgtaccaccaggctgagggggctaggtgggcaggctgcccagccaggccctggactcaccacatggagcctcccagtgaaccctgtgagtgcccaccctttgcagcctcggcaggctcagtcagcagatctgagagccgggagtcagcggaaggcagggctaggtgaaacaaacctgcaatcatgacctcgatctcccccaaggtgaggtcttctagatctgtgaggaagaggttcacatctcccaccatgcagctctcttcggtggcgcctggctgggcctgccacttctcggcatccagcacaatgaaggtacactctgaggaggaggtgacagggctatcacacacactccccagaggagagaagagaggatggtactcctacccaagccagagcactgcagaacaccagcatctctgagtctgccaggagaagagggggtcccagagcttccttcagctcattacaaaattccaaatctgcctcatacagaaaaagcctctccaaccagcaaccaaattctcagagagcagggaacacagaggagggcagtcaccacactaggctgtggtgagggacatgaggggcagggcctcaatttacagccagagccccaaatgctctactttctccaaatccttccaagcccgatgcagtgggtggggaagaggacagaagggtcagccacagggactggcttcagggccatgagaatacaggagttccagcaccttccaggcttttcacaaagcttctatggccggggctgggaaagggaaggaacctggagactgactgtggagtcagccctcccagtaccagggctaggggaagtgggggggcactcctcactgtctgcatcttcctgccagctgcactgcatggcatactcctgctccagggtcagcggctccgaggctgtcaaacgctgcagctcctctgatttcatccactcgtggtacctgctgggacagaggggtggctttagacatggaggactcattcagaggcatacgtctgacaccttatgagggtccagaaccagacagggctaacatagggctcaaagaagacccaaagggttatgattgctcctaaggcaggggccacagacacaagacccagaagcaagctagtcttacacaagaacagcaggacgagtcagttctatctgtccaatttcctatcctgtctcgggtcagtgcggaggagcagtctgaaaccaaacattcttcaaattccagaaggggatgtatatggcaagccaacctcaacaaaggcggctggacagatcccacgaagttagggcaccaggaaccctcaaacggaaaactacaagtagagaatacccatctacagcaccactatcccaatctaccagacatgtgccaactgcccccacaggaatcccatcatgactcagtcctggccttttgaatggtagatatcacaactcatcagctcagagttcaaggacaagctaacattaagtctccaagaactgaacatactcactggcaccagggaaacatcactaatttacaattaggtgagaagacaatttctttttcttccacgtttagtttacataaagcaattccttgctgaaaggccaaaaagctgagagaatgaaagggaagaggatgggcagctcctcccaaggaagtcacagtccccaggttctgctattttttttttttttttttttgagacagagttttactcttgttgcccaggctggaattacaggcatgtgccaccatgcccagctattttttttgtatttttattagagacggggtttctccacgttgatcaggctggtctctttttttttttttttttgagacggagtctcgatctgtcacccaggctggagtgcagtggcgcgatctcggctcactgtaagctccgcctcccgggttcacacattctcctgcctc[222 bp omitted]tctgttgcccaggctggagtacagtggtgtgatctcggctcaccacaacctccacctccctggttcaagtgattctcctgcctcagcctcccaagtagctggaattacaggtgccgggcaacaagcccagctaattttttgtgtttttagtagagatggcgttttatca[142 bp omitted]ttttttgagacaggttcttgctctgtcacccaggctggagtacagtggtacaatcacagctcacagcagtcttcatctcctgggctcaggcaatcctcccacctcagcctccctagtagctgggactgcagctgtgcaccaccatgcctggctaatttttgtatttttttgtagagacaaggtctcgctacgttacccaagctggtctcgaactgctgggctcaagcaatcctcctgccacagcctcccaaagtcctggaattacaggcgtgagccacggcacccagccttttttcccccctcatatataattatttctcacaaccaatgtttcttcttaggggaaatagccctgagactggggctgtaccttacacagctctgggtgctgatacgcaccccatgtcaagcgggaaagatacctgggcacatgctccgaggtgtagggtacaaggaccaccttcttccccagcagcaaggtgttctgattcaacctcatggtagcagcctgcatgcagatggggagagcaaagacttcaggaccctgaatttcctccaactttgggtaggcgctccagctttcctgctggggctaagttgacttccgtcattagttccgtctagacacttcaaagaatacagactccaaaattcttgcaagaaagagaaccaggctggttaaggataattaaacaatccttgactcccactccaagaggccaagcctgggctccgtttctgccggttccttccgtccactccccagaacttcgattcctcaaacccaagcaccaagtaccaagtaccaaagtatccccagagctcccattacttgccccagtccagggattccaacccagaatcaactttcagccctgccttaaacctacttccaacctcttaccccggcgaccaccccacggggctctagccactccctccccgcccccgaccacttcagggcaaggcgggcttagtcttaggccctcccctttgagtggcgttctagaccactctcttcgaccctccaaccacgcggacccgggtactgccaagctcacacccacctaccaccgacgaaatcgtcccccgcagaaagggtgatctacctcctccaaccagccacgttcccaggcccggccggctaccgccccttccgcatgcgcgtgagaacgcgccccgcccacttccgccatgctgacggcagccgccaggccccaatcccggtcccgcccccgcgaggcgcccaatcagcgcgcgcgaaaaaggtgggctgtggggccggcgcatgcgcgctgcggaagctggtgctggacagctggcgccggcagcagcggaccggcgggagacggcggcttgggagctggctgtgctgcaggtgttgggtcgggtcgggtcgggacgggcgggagaggacgagacgggtcgggataggttggggcggggcggggcggcactagactcgggactcctccaggagggagagagagggagaggctgggagtggggttcttgagaaaagagggagctttgagggtggggaaccctaagagagtaggtggggccagggagtggaggccccattaaaaaaaggaggccttagtgccaagagtggagttggaagggcaatgtaggaaagcccccagctccctgccctaggcagaggcggcagacagttccttgggctcccatgtgtggtagtgagctcctggttcctggaactaaacgaggataaccaccccagagcgtggaaagggggctcttgtggtgggtgagacttagtggttttagaggccccttaaatcacttgcaccccgagcagcattgaaaacatccgtgctgggcacagagcagtgccctgcacagcaagggaaatgttagaagaaaccgtccagatttctgtcatccagggtgacccctccctcgggggtgagtcttgtgacagatactgaggccctaagtgtctgtgataaaagaaccagaggtggcaggggaagtctgcaagcctcctcccacccctgtctcagtccatcagataggtgaagcctgctcttttgttttaaggagctgcggcagccgccgtccttgcacctaaggaacctctgctgccagcccttcctcacttttggaaatggcgggtgaaattacagagaccggggaactctactcttcctacgtgagtgtgacttatagaaccttttgctcacttaagtgttcctggcttctagaaaagcacattgcttgctggagatgggactagtgagtgctgctgcttgagcagaccatagtggaagcaggatgggggagttccatggggcagcgactacagtgctgctgtggtggctcagaatgtaagtcagatttattctctttttaaggtgtttgtcagagtggtca[138 bp omitted]catggtaaaaccctgtctctactaaaaatacaaaattagccgggcatggtggcactgtaatcccagctactcgggaggctgaggcaggagaatcgcttgaacccgggaggcggacgttgcagtgagctgagatcgagccgttgcactccagcctgggcaaaaagagcgaaactctgtctcaaaaataaagaaataatgttcatctccaggctaccacacttgcctgcagtgctgcccttcagatgaacagtgattgacagctgttgactctgggttttgctcatctcagcagttggaaaccgctttggtctttactgaattttaaattgcacaacttttatagtcttggatggcgtaagaagcagcgaaagcatacagagacttctaattacagtttggtggactctgcaattagaacaattagaatgattgattctcactgtcttaggtctgtgttacctctggctgcccccaacacacacgcagtttatcttctctatgtaacgtatgattggtcatagttgttacatcacagggccctcttgcctggataagtagccagagggttggaataatcagatggttgactcaggttgctaccaaccctcccaggcaaaagcagcactgccctaagtagcaagagttttctagaacttgacctgccttcaacagctgccctgccttgtacatagcttcctagcctggggatctctggtctgtttctgctagcttcacagactagcattgtggtgtgatggacaaggaagtgtctccaagacatttccttcacagctggaagaaagccttcctgattccagagtcttcctattgggcctgtgccattcatgtgtggcaa[135 bp omitted]gcaacctctgcctcccaggttcaacctctgcctcccaggttcaagcaattctcctgccccaccctcccaagtagctgggactacaggcatgcaccaccctgcccagctaattttttgtatttagtagagacagggtttcaccatgttggtcatgctggtcttgaactcctgacctcaggtgatccacccgcctcagcctcccaaagtgctgggattacagccgtgagccactgcacccagcctctcaggtgaagtctttcatgaaccctggaatggaataaatagtgtccctctcatttgtggaattatgtaacagctcctagcctcctgctgtcagtgatgaaatctctatgctgtctattaatgtaaaagtcaccacggctcctgctttttcttacaacatctgtaaatttagagataaggagatgagtcatccctgtaactaagttttgtaaggaaaacacttggatatgtccccatttcttgtatctccggttgtttaaggggtcctctcacatgtcagcatgtgcccacaggaaatgaggcagttaggcctgcaagcttcagtgcgctctgcccgtttttgttctccatctcctctgtgttttatttcgttcagggtctttgttgcccagagggccagctctgggcattggccataaacaagtgcttgtgttgttttatcctactggtgaagagagatgtagggaggagatggggtgggatggggaggggatgatgtgacatcaaacaggaggtgtagtggtcagtgttctgaggggagaagacaccttcttcctaagggttccttaactcccccgtcctggaacaattcttggtcctctgtaagaccagaagagttggttgtcactgaacccagataagctgtggaactaactcactgctgatgctggctgctctgagttcccctgcaggccccagctcaagacaacgtgggcagagctctgccctggctgccttgggaaaccaagacacggggcaggtcattcatacgtgtgcttcagcccacgcgcatttacaagacaaagcctctccttagctctctattgccccattcattttgagttcttttccccttcaggagttccaaggatgttcgctttagcttgaattattctgcctaaaatatttgtaacaagcagacgaacctcctaggtggctcagatgtcacaccctctcaagggtagtgctgaacacgggaacgtggttcagagaggtacatgtccccttaagggatctcaggataggcatgtctgtttccccatttatgaggaccgagagtgacacagaactgaagtggttgttgtgtgatcaaaatacaggatgctgtaggtcacgcccgacagaagggtcggccgctgagggtgcctctgcctgctggttcctgctgaagattgttgcggttgctttcgaaggagagaggcttgtttcacaccctgaaatcctagtcattgcttccgcatctttgctgccttctgtttcctttgacaattgtcagaggggaagctgttgaaagatactggtgacatctgccccatgcaggtcatgagtgaggctgctgggtggagacgaggcatgtgggatgctgcactgagctctctagggcataggagagcaggccagccgtcccagggagcagtgcctgtgcctcctccagtgcagccacagaggaagaggtgagaattggagataactcagtttagaatgcatgcattggtcttcattatcaagactgcagtagagcctattcctcagctttctgccactgcttcccaggagtctggcccacagaactgtcccacgaccagcagaagagaacgtctcctttctcttccttccccacaacccctcctgacccaacctgtggctcagcccagatttgcttcctgcctctatgtctgttcattgtgattggccatcactgattacctttacagaaggtgaagaggactgaatgctcgccaggagtgccacagtcctgagaaggcagagaagtcctacgttaccctgcaggattccctgagcccccactaaacacacagggcttgctttggaactgaaaaaattgcaacaaagcaagacaactgcaattacccatttctgctcccaactgccaatagtttctctcttcattcatttctttgtaaagttcttaaaggttcctaagtttcttttgggagcatgcttatttcattatacctctctctacagcagtggttgtcaactagcggtgatcctgccccccagaggacagtaggcagtgtctagagacatttttgattgtcaggacagtactggttggagagaggttgttaccggcacctagtgggcaaaggccggggatgccactaaacatcccacaatgcacaggacaggtccccatcatgaaaaaagacctggcccccaaatttccatagtgcccaagctgagaaaccctgatccacaagagacctttgacttttacatcccaagaccttcaagcatccctgaatttacaaatgcctcttatactgtttagtttccccataaaacttttgcctaagaaccattactttcttttttttttcttaagacagggtctcactgtgtcacccagtgagcaattacagctcactgcagccttgacttcctgggctcaggcgattttcccatctcagtcttccaagtagctgggactacaggcacttgccaccgtccccggctaatatttttatttttttgtagagatagagtcttgctacattgcctaggctagtctcaaactgctggactcaagccatcctcccacctcaggagttctgggatcacaggcatgagccaccatacctagcctagaactgtcactttcttatgcctctttgctttctctttacttccattatgggaacatcattctccataaagaaataaggtttttttcccttcataagtattactgcctacagaagcgataagcagagaacagagctgcagggagggcagatgttaggttttccgctggggtctgttctgttagtgccctgcttaaaatgctccaaaacatccaaccccctgtgccatccaaaagggctcttcgcagtctgactgcagcctcttccagccccacccctgcccggcttgctgtgcttcagccacacaggccttctgaaagctcctcgagcctacctgcctctttcccactgtaggcctctgggccgggaagtctctccctcgtctattgcctgggtagcaccttctcatcctccagctcccttcctggggtatccactgtttccaatgctttcccattgtgtcttctcacagtgccctgattgtttgcttcataacgcctctctcaagctgtaaccgtagttgttttcttcccaggctggagcgcagtggcatgatctcggctcactgcaacctctgcctcccgggttcaagtgattctcatgcctcagcctcccgagtagctgggattacaggcgtgcaccatcatgcccggctaattttttgtattttagtagagatggagttttactatgttgcccaggctagtctcgaactcctcagctcaggcaatacacccacctcagcctctcaaagtgctaggattacaggtatgagccaccacacccggcctgtagttgttttcttgttgtctgtttcctcctccttagaacgtagccccgtgagttcaagggccgtatctgtctggtttatcattgtatcctcagctccaagcacagggcccggtctgtagaaggctcttgttggtttttgaataaatgagcagaactgagctagctagatgaccccttcccacccttgtacacatgagcatgaaagtaccagcaaaagtaaacatgagttagttatagacattcacagtcactgtgaaaagccagaacttcccattcagaagaccagcaatgggctgtgtgtcccctgtctcacccaactgctgccctcaaaattattctagcagcaccactctgagccaggactcccaaaggggaatcatatcacgatgatgatgtgatccaaccaaagcataggaagatgattcaaacttgttttcatcattctgggatttgtctgtgggatcaaattgagattgagggctgggcgtgttggctcactcctgtaatcccagcactttgaaaggtcgaggagggtggatcatctgaggtcaggggttcgagacccagcctgaccaacatggtgaaacgctgtctctactaaaactacaaaattaagccaggcatgatggtgggtgcctgtaatcccagctactccagaggctgaggcaggagaatcacttgaatccaggaggcaaggttgcagtgagccaagagcacgccactgcactccaacttgggcaacagagcgagactccgtctcaaaaaataaaaataaaaattgagattgtgacatccaaaactggatggtgaagactctcagactcacgtcagagataagcagggtccagtgcaatcagctgggtgttcccatctccagcctgtgtgccagacaccctgagaaatgcagagagaagtgagacgcagcccacggccacagtgagcttcatatttagtaacagggaaaagagaaatatgccaatatctaaaacccaagagagggcataagaagttttgttgccacaaggattcaaaggcgggaggcaggacaactttgggagcctgggaaggactttgtggtagaagttgcattggaatgggccctgaaggctgggtaggagttggaggggctggggaggtggcacaagagggctttggtcctgtgtcaggtattcaggtactgcaggcagagcactttcctctccacagggtggcctcccttttgtcctgctctcaaatatccagttagcacctgctgggaagcctgtcttctctaaccactgcccagcccctccttctcccagccaatagctccaaggcaggagttggcaatctctatttcttcatgctttttctttttttttttttttttttttttttttgagacggagtctcgctctgttgcccagcctggagtgcagtggcgcaatcttggctcactgcaacctccacctcccgggttcaagcgatccccctgcctcagcctcctgagtagctgggattacaggcacacgccaccccccagctaatttttgcatttttagtagagacagggtttcaccatgttggacaggctggtctcaaactcctgacctcgtgttccacccacctcagcctcccaaagtgccaggattacaggcatgagccactgcatccgtcctcttcatgctttaaaaaaaaaaaaacaaaattgatggagtctgggagaatgggcaccaatttttgtgtttctatcacaaattcagcatgtggctatctcagaaaagctttaaaatagagaaaagtgcatctttctaagaacaggagtgaaaatgagaaatgggtaagcattcccagagatgaggtgtttgtcttttttaatgatcagaaacaggtggtaaagcatacggtatgtcacccaatttagcagagtacaggaagaccagttaggagtctactgcaccagtccaggccggaaagactcatttgaattgtaaataaggataggagccagagttagccactaaagaagctccagaaataaaatcactagaactgtgatctggaggggaaggaaggaggatggggccactgatgggatggatgtctaggtgtaggtgactagcaggcagctggacttgaggtctgcagaaaggttgatactaagagaaatacaccaggaaaggaggcgtgtgcttggtggagcctgccgattgcaccaagaaaggaagcagatgatgccaaaataggggtgggcttctgggagggaggattggcaggggaggaggctgggggactggagagcatcacagaaggggaggaactcaggtcagacaggaaattcatggttgagatcttagaaagggaatcattgtaaactgtgggttgtttaaaacctgaagtcagtgacctgagaaatcaccctgaagttgggtgggcaagcggggagggaagaatggggagtggccgctaatggaaatgggctttttggggggtgataaaatggaattagctggtggcactggtcacacaaccttgtgaatattactaaaacccactgatgtgtgtactttaaatgggtggattttatggtatgtgaattatgcctcaactttttttttaaaaaccctgaagttggtatggggagaggggtggagaaagagaagcatgaatatccgtgtcccaaaggacaatggcgaggaccttgagtcacatgctcagtgatcttggaaaagtgggtgtttctttgaggtcagcattatgcgctcacctttgtgccaggtaccccgcctatgatgctctgtccccgggaagcctacagcctggttgagtagagcgctagcatctgcgatgcagctttaggaggggacggcaatgatgacagcaggagcagagactgaaactgaaccccagggcttgagtcatccatgtgttcatgtttggttaacaggctctgtggttgcaagcctggctccttaggccccaggtgtaattctcctgtcctgcctccttccctgtctacagtgtggccttctggcctccacagtggtgccatcaccagggtcgttccttgggagctgttaaggggagaagttgattaagttccgggcttgaatgttgcctctgtcggttccaggttgggctggtgtacatgtttaacctcatcgtgggcacgggcgcactcaccatgcccaaggcattcgccactgccgggtggcttgtcagcctcgtcctgctggtgttcctgggcttcatgaggtgagaggcagcggggacttccccacaggggccaggagtggagcaggagggagtcagcccaggaagcccgaacatgagggcactgagggggtgggaagacacctgtctaccccgtatcgagctcagtgagtccttgccagggtattcagagaggggaaagtggtcacagaggcctcctggtggcttgtctttgtggagcggttgcacagccctgatcagataaaaacctggacatccactaggctttggaatgtttcacgtgatgctggcctatttcttccctggcaggtttacctccctgctattaaatgtatgctttattaacattaccatcaagttttgctgtctgagaaaataccacccagccacagaaaaaagatctaacaaacatttaaggtgacatgggaaatcagtttggaatttagaatttacttaaggtaattcacgaagtaggtgataaacacacgcctgggtgcacgatcaagtgtggcactcgcctgctgtgtacctccccaggtcttcagggacgcctactccttgagccaggtgtgtgggcctcaccagccggtgcttcagggagggtgggttccacctgaggctcttctcggggattcccacacacgtagggactagtctgaagttgtcagcaagtgccccaggccaggaaggggtttaggactaggcatttccattctctcaaccgggtaggaatccacaagctgcaaaaaagagatgggaaggagcacctggaaacacctcccctgagaggtgaccctgccccatctgtgcaccaagcacccttctgggtactgagggggcctcaccacaaagatccctgcctgtgcagacttgactttatgttgtggggagaagtgacagcgagcagtgaagataataaatgggtaaatggaagagtgagccggaaggcagtgagtgctgtggaaagaggaaggcgtaacagggcgaggggactaggatgccggctgaagcagggtcagggagggctgcatctaagcaaggatctgaagggggagggagtgggtgcgggcggaaggatgagacggagcttagtagttggagcaaactaagacgtacaggaagctgaatgggataggaaaacgcccatggttttcagtttcttcatgcatttcttttggggagttttgagggtgaatcttggggcactattggttcattatctacagtgagccctggcagccaagagctctagaagtccttgtccttacatgactccgctgtcccctttaaaggaccttcagcacaggcagccatctaatgggaagtgatcattctgggctcccaggcagggggtaccacaccccgctccttgctcaacccatttgtgtttgaacgtgatcgatgagttggccttgcgcaaccatgaaaagtctctttatgccttaattaagattgattttaatttcacgtccaaaaagaagggtaaatccaaagcccttaaaatggtcacttaggcaagataatgagaaacctttctaggaggtgctgaggcgattggaatgggggtttcagagctggctgctcccccagagtgggagtgagtgtgggtttaactggtgtggggccaagtgacccctctgcctcctgccacctgacgtcagggtgagcagtcagccccccaacccttgtcaacactcagggagaggcaggggtgagtctgctggcagag[211 bp omitted]gaggcaggagaatggcgtgaacccgggaagcggagcttgcagtgagccgagattgcgccactgcagtccgcagtccggcctgggcgacagagcgagactccgtctcaaaaaaaaaaaaaaagaaagcaggagatgaatgttcgtcccatgctgttccacggcagagatggattcatacctcaggttttattagcaggaaggcagcccacttctgtatcctccgttaacaaaagcattcatgcattccagctgtcatctaggtctctcaagtatccttttttttttttttgagacagaatctcgctctgtcacccaggctggagtgcagtggcacgatctcggctcactgcaacttctgcctcccggattcaagcaattctcctgcctcagcctcccaagtagctgggattacaggcatgtgccaccatgcccagctaatttttttgtatttttagtacagacgaagtttcaccattttggccaggctggtcttgaactcctgaccttgtgatccacccacctcaacctcccaaagtgctgggtttacaggcatgagccaccgcccctggcctcaagtttctttaagaggaaaagaaaagatgatttttccaatctagtctgacttcttggcaagcgtctaatgccacctcccaatctcccttttgaattggtccgtagaagtgcaaacttattttaatattagccagattatttggaaagtaaaaagtactgccaaagaaaaaagggatggattccggagccaagtacccatttccaattatccatgcctgcgctccttccgtgagtgtatgtaattgggaggtgaccactcgcctgtgtccttgcaaggttgacgtgaaagctgcctgctgtccttccagaggctggggggccctttgtgaaccagcctcccctcactgagagcgtcctctgatgtctgcccccaacagcccctcctgggtgtgagcacggcttgtcccagtatcacgtctgcccccagctccctctctcctttggttattttccctcccatcacttagttcacacctctctctctcgtgcaccggaaatacgttctcactatagacagcaacgtcaaagcatgcacacctttttaccaagtaaagcccatctctagggaacagctctcagaaaagagaatggtctgggctggtgggtctggtcggttcttacaatggtgttttccttctctctctgtctcctccaacctgtccgcctttggcgctgggcactcggccccctcagcttcgtgaccaccacctttgtgatagaggccatggctgcagccaacgcgcagctccactggaagaggatggagaacctcaaggtgtgtgtgttgccctcgtctccgggccatgcctctgttccgtcaggtacccagcaggcggtctcagcagcccattcttttcctctcagtgcatggcgggctctgtccacggcactgctcctggaccccagtcccagagctgaagcttaatagccacctaaatcttaaagcacaaatggagcctctgccactttcccgtctcagcctcaggccctcctacccacacccgcacccagctcagctgtttgaaatctttgtacccaggaactgtgttgtcacttcttcccgagtgcgtctctgccacctctaatggggcagcatagctgtgctgagagcttcctaaagatacagataccctgcagaaggaaagaacacaggggccggtgggggggctcacacctgtaatcccagcactttgggaggccaaggcgggcagatcacttgaagtcaggagttcaagatcagcctggccaacatggtgaaacctcatctctactaaaaatgcaaaaattagcctggcatgatgatgtgtgcctgtaatcgcagctactcaggaggctgaggcacaagaattgcgtgaatcggggaggtgaaggttgcagtgagctgagattgtgccactgcactccatcctgggcaacagactgagataacatgaagtggcaagcatttcaaaaaaaaaaaaaaaaaagaggccgggcacagtggctcatgcctgcaatcccagcactttgggaggccgaggtgggtggatcacctgaggtcaggagttcaagaccagcctgactaacatggtgaaaccccatctctactaaaaatacaaaattagccggccgtggtggcaagtgcctgtaatctcagctactcgggaggctgaggcaggagaatcacttgaacctgggaggcagaggttgcagtgagttgagatcacaccattgcactccagcccaggcaacaagagcaaaacttcgtctcaaaaaaaaaaaaaaaaaaaaaaggaagcaggtttgccattgtcctagggcttttctgtagagttccatgctctttttttttcctttctctctttcttttttgtttttttgtttttttgtttttttgagacagggtcttcgctctgtcacccaggctggagtgcagtgttgcaatcacggctcactgcagcctcgatctcctgggctcaggtgatcctcccatctcagcctcccaggtagctaggactacaggcacatgacaccacacctggctaacattctgtacttttttgatgtgctcctttcttttcccttgttttcctccctcctcctcgtccatcctactggctcccaggaggaggaagatgacgactcctccacagcctcagacagcgatgttctcatccgggacaactacgagcgggcagagaagcggcccatcctgtctgtgcgtaagtcttggggttctcgcgggcccgcacttccctccgggccacagggttccctttcttcatggagagggccctggagaggctccccgcagattctggcatttcctgcccctgggttctgaggcaggccctgtggtagactcaaaagagcacagggtttcagtcctgggcacaggcctggcccctgctggcttggccactactcagatttgcagcttggtaagttccttgacctgtgcacctcagtttccccccataccccttcctgttactgagatgattaaatgcctggttccttgcctggtgcaccctggaagctcaagtagatgtcgttctgtggcatctcttcttcctcctgccttgtgccctcatgttcatacatgcccctgccttgctgtctcctccctggtcggctgggttaggctctgacgcctgctctccctttcaccccagcaggagcatctctgaattcccttaaaaaaaaaaaaaaaaaaaagactgtgttaaaccatgtcaagcaggaaacattaggaaaagttttctcgagtttggacacttggggatttcatggtttagataattcagtgaggtcctcaccaccctctgaagctctccacgtgaagaaccacttcctcttccttgttcttttggctctgcagagagacgtggatctcccaacccgtttgaaatcacagaccgggtggaaatgggacaaatggcctccatgttcttcaataaaggtagaagttcttttgggggtggggtgtggggaaacggggagctggtgcttccctgcaggcctgcacccttgtaatgagggctccaccctgacagccagaccatggggcagagcaggtggtagagctgctccctcagcacctgagaagccaccttgctgacctgttttcctggattcctccctgtctgcgggcattaaaaacaaagaggccgcttctctagcggaagtcaggaaccccaggcagctactccagccagggtcaggaaccccaggcagctactccagtgagggtcaggaaccccaggcagctactccagcggaggtcaggaaccccaggcagctactccagtgaggttcaggaaccccaggcagctactccagtgagggtcaggaaccccaggcagctactccagtggaggtcaggaacctgaggcagctacaaaataagctttttccttttcctgcaaaggaagttgatggaggccggttgatggttttgcacctcctgcttgattgcctctgaccttgccctcttctggccgattctgtctagaataacaccttctgacagcgctagaatctgctatgcgcacgcctgggcgtggcttcccagtggccggcagagggcgctaggagcccacacccaggcttgctgagtgagaccggagccctgaagtgtgctggtgaacctgctccttcctgggatctggctgcaaccataagggagccacccaactctggggttgagttgttgggtgtgccagcgacatcttatatctccatggcaaatctggttcttt[132 bp omitted]aaccctgtctctactaaaaatacaaaaaattagccgggcatggtggcaggcgcctgtagtcccagctactcgggaggctgaggcaggagaatggcatgaatcctggaggcggagcttgcagtgagccaagatcgcgccactgcactccagcctgggctacagagcgagactccgtctcaaaaaaaaaaaaaagaatttaatggccaggcatggtggcttatgcctataatcccagcactttgggaggccgaggcaggcggatcacttgagaccaggagttggagaccagcctggccaacatggtgaaaccccatctcaagtaaaaatatgaaaattagctgggcgtggtggtgcacacctgtggtcccagctactccagaggctgaagcacaagaatcacttgaacctgggaggcggaggttgcagtgagccgagatcacaccactgccctccagtctgggctgcagagtaggaccttgtctcaaaaaaaaaagaaaaccagaaaaaagagtttagtttttaatgcccagacctgtttatttccatttcattgagagtcagtcacattctcagttcatccttccccttgcaactgtcttcgaagattttctgcccctttgtcaaagccccgtttgtcgagtgggctgccctaccagttctttctagtcttaaatgtggctgcacttaacttagagccggggggactgtaggaactagaatctctttgactgctttttaggacgttaagcatttaggcagggcgatgtgattatcagccaaaggccgccctagggcctggttcaccctccctgctggaccggcctcacagagggatttcagaattcagcaaaaccaactggtcaggttcagcccgcatctgtgcttctcctttgttccatttccatccctcccgtctcaccagcctgagcaagcataagcgtttcctcctggcagcaacgcaaagtccccttccaaatgcaagctttaaaataaagtgcacattggaaggaagacgcatgcttttaaacctcctttctcattttcatgttgtgcagtctgccctgatttctttaagaattctagcaaacagcagttttgccttttttgccccccactacagactagactcttaatttgcccaaatctaatggaaaataaagacattgtctgagaccagcctcacacttaaagggagtctcctctaccctggagtttctcaagctcagtcctgttgatgtttgggctggggaattcctccttgtgggcctgttctgtgtgtggtagggtgctgagcagcatccctagcctctgcctgctggttgccagtagcacctcctacttatgacagtcaaaactgtcctcagacattgtcacatgttcccagcagggtctgggaggcaaaatcaccccagctgaaaacctccgctgtgctccattcctgattcacagactgccagattgtcatcttcacccttggtggggctgcctcctctataggaggctcccttagggtcccagctcatttcttataatcagaaatgcgggcctagccattgatgtcttctcaggaagttcattgatcccttattttgtgtctagtaatgaagtttattgaccagggagggccaatggcagtttataaacagagctgatgccagagaccattggcaggtggaggaaaggctgggagtggggcgggggacaatgcgtcccctcagagcagaaaacaagctggagtgcaggctgtacctggagcctgggcctgagtgacaggccaaccccagaggccactaagcttggacgtcaggctatctctgacatgtcagggaaggacatgccatattcaaaaagtgagtgccgaggcctcttgggtccccttgaggatcacgttttcttagtcttttcccccccaggctcctaggaacagagctgacctcacatggcccaggaataacatgtcctaggctttccgttgggtaccctgcaggctcttctgagccaccaggattaaaagggaactgtcacttcatttttctttatgttctcagagaagccagcagcttgagaccagtgacatcaaaaacgtgagcctcagtctgagcaagggtggagactggttgtctgagcagtaacccttaggtcatagggccctgccactcttttcagagcccttgcacctggcctttctagctggaatcatttatggaagatggcccaggtggaattcttctcacccttacgggtttggagacgttcatggacttactggggtcctgaaacaagtctgatggaattaggactagagccctgtgttcccaacttctcgttcagcctcctgctggagtgagaggggacaaacgtcacctctgcagcagaagtgtcagtatcacacaccatccagagtcagcattgtcccttgggagtgcttcccgtaagaaggaaagggggcctgtcttgagcaccatctccccagcacaccaggccaccgtgtgcttgggatcagtcagattcagaatgagacagttggcctttggaaatccagggctttttaccctttggatcccagcttcagagagctgggctattttccatcaacttctctttgcttcaactctttagtagcaatctcttgtcttagagcccggtgttggctgacaccagagggggccccagcccagacgcacctggggttcaggctcctgactcgggacatctctcctccctcctcccaccccagccatgccaagactcacactcaccgtgcacctgtctggcttcaaaatctctctgatcctcccagcctcgttgagtcctctcaggtgaaagtcatgagccgatctgtctcttgtcagcatcacagtgtagccagccagaaaaagaaataggactttggggtcattttcccactttttgtagaaagtaaacagctcagagaactgaaagctatgggagaggtagagatttagtcaaaaagaagaagaaaaaaaaaaaaacatgcagacatctctttgtggctccctgactgatggctgtgttcctttcagtgggggtcaacttgttctatttctgcatcatcgtttacctgtatggagacctcgccatctatgctgctgccgtgcccttctccctcatgcaggtgacctggtgagtaccctcctggcccccaggttggcggtagccaaaggggcttcctcagcaagtcagggcagagtgtccaggggagaagcaccatgccaagtgagttcattgcatctagggaatgcagatgcccaggcccttttctgcacagaccacagccagccatgctgtctgtccttagctcatgtcactgtccccttccctgccccactaggttcccaccaagggctcctgagtcattgggaaatggtgctgcaggaacaaggagggtgcatcctcagagatgcatcccgcaaagtggtttgtgaaaagtctgattgttggcgctcaggcagctgtgcagggagtggcttctgtctcccccagcccagccaggcggcctcgctgagcctgggcctgctgtcattctctttatcagcagcgccactggcaatgactcctgcggtgtggaagcagacaccaaatacaatgacactgaccggtgctgggggcccctgcgccgagtggacgcctaccgcatctacttggtgagtgtctgtgcctctgtgccgcctgccccagcccagcctgcacagctgagggcatttgaagtgcctttacttccaggtagaatcctttccccagagaggaggatctactcttctccacactctggctaagcactggggccttggccccaggcagaaatggatcgtgtcactaagagtctagcccccaaggttcctggcagcaggcctcaaagtcaagcgtggtttggagtaggcactcaggtcatagccagattcaggaccgtgactgttgtaaacttagctcagattctagggccgacctcagcagagttctccaagagtgacacgtctcattttttccgaaactttccatattttgaccttactcctggccagcccaagagcatatggttcgatgctgggtctggccgtaagcatcctctccagttagggaagggtcagcccagctctcttcctatcttccctcctctcatcctcccagtggacaagagaagacgatgaatctccaggctcgttcttgattgctttgtgccgttggtggggggcagggagctgaataatatgccagacaggtcctggataataagatacaaaatcagagacagttatttatctttgcctactttgggggcgggactcagaaatgtttttctttaactgttgcagtatctgttaatattctctgcttcctcttggtcctcctcagccctgacataaatttaggtgtgctaggtgacacacagtttgacacgtggccacttggctgatttggagcagggaggcagggaccaagagagagccaggcttttcagggagctggcctcccggcttcattatccctatctgaggaaaggtttccacaggccctgcaggctatttggggctggatttcttaaccccaaggggccactgaagggcttttcttgccctcctagtcccactctgcagccgtgctgtaggagccctgtggcctgggccatggagaggttggttttcctctctgcctctctggagcagtcagctaatggtcagtgtgtcttctcctgcacattcatctgtggctagcagtttagtaggctgcatccctgattcctccgttgcaggtctggtgggaatttggtagcgggttaattgtctggcacccttctccaccttccccagccttggggcgggaaaaggtactggcatggcagccggaggggtgagcccaggcactagcagcacagctgaggctcattagcctcttagctctcaacaaaccatgactgacaaaattagcagaggtattagtaagggaaagggcccatctggatctctagcagggtagatgggcagaaggaggggatgaaggacaggatttgagcggctcgcacagacatggtggcatgttcagggcagagcagccacagcagagccagtttggtgggtctttgctggggaggctgctggaatctaaagaccctgccaggcacactccccgcccaccagcaaaacggatactgagcgctgggaatattggctgctgccatttgcctgataaattatttagaagcgttattcttgccttgttaaatggttccctcacttattcctataaaccttccacatgatggaagcctccctccctggatctcaataactctctgaccgaacagaaggaacccttcaggaaagcagacgggcattaattactgccttcatctcccagatactgcatttataactcatagagctaattgtcatcagagcctgcaaaagccacgaaaacaggaagcagaggctgcagaacaggagtggagaccctggctgcccacgagagccttttctttctgggccagtgacagtatccttcccccatagcccagtcccctgctgggggcttctgtttgctcagaggcttttggtttgcatgggctcttctacccagtttggagaaatcaaggcagatgggccttggcattgtctcagaagtcacttcacagttttgcatgtggctcccagggtgtgaggttctgcagaacagtagcctgctgttcccttgaccccagaccctggtgctttcattgctctgcagccccttcccctcccttggtgagttggaaggggcagagtgactggaggaaggggggttggcaaagatgtgggtttcctccctcagtcctgagctcttctgcaagtgatgacggcatcttcccctcccaagtctggcctgcaggtcttatccctgtgcgtctttgtaaaggtcaggagagctagattccatcaagtggccccttgggccccagaggaggagggctgtccttccccgctgccccctggtcattctgtttcagaagattgtccatcccttctagggatgccacactgcctctcaccaccagctgtttctgattttgctgccagccagatttcactcagtgttcagcaaggcagcgagcaggtcggaggagaattgaaagcacctccctaccctgcacacagaccttgtttgtctcaggtagatggtgcccctacccaggctgcatttttaaaagggcctgctaataatctcttcttcattgccattctgcaacagtagttctgggggacagagatacagacttttatattgtggtctaactttcagaaagtcatctggaagcgatttcttctgtgtcttcccaggaatgctcctgagacgcacacacacggtgagaatccttgctacagtaactgtctccagggctggcctgtgtgtagcatcatgattacttacaaaaagggagatgcttctaccagcagctcccagtggcctcccaaagcccttgaccttcaccagtggaaaattccaaccccactccttgtgcctgacgacccttgtccatatcctgtgcttcccggcgcggctgatatgagtcactttccccctttccttccctggaggagccacagagcagggtgctggggggtggaggtcccctgagtcacttgctgcttcagtgggctctctggggtgtcccagcaggccactgcagctggagccagcggtgacctcagccctgttattagggcccatggagattatcatcaggatctgctatcagctgaccttggattctcaggccccccacccacccatccctcctgctcttttgaaaaatcaaatgggaatgtgtgagatgctccagctctttcaaacgggtaaccttgcctccaggctagggaacatctcaggattctttctgcagtttctccggctttggtaggcaacacagtcagaagttggcatttcattccttcctctacagcatgaaggagccagggacccctggtgaggtgataggattgcgtatgaaccagttctgtttgggactcagactgtcccaagtgtctgggatgcaggcgtgtgtcactctccccctgggatcaagggcactgcccagcacctttgttgcacttccttattcctgcatcacctcccagccaatattcctgtcccctgtctggacccatccctcctcctagagagagtcagagggaagcagtgtcagaggggacagtggggactcccaagtgctgaaagcctctgaaagcctctcaccattaggaagagcaagcggcatctaccgctcacaggtggacagatgctgctgggtcgcaggtggcccggcaggccccggccgaacagagccgggaacgcagatggcagagcggagcttatcctggctggagacccggccgcaaactgccctgttgagcagagggcccttcgtgggctgccctgggacaggacaaggtcgccctggcctgctctcctgccttgaacacaggagctgtgagatccacctccggggcacaggtgactcaggagagggatacagcctgcaagtgcctggccagtgccctgccaccccttgtgacagagagagtcttcccaagctccctccggacacccccttgaagaagtggagggccagggggatttctgtctgctggcctctcttcctagagggccgggtcagtctcagattcaggctcaggttgacaccggaagggtcaagggtccttccagccctgtttgcgacagccctgttttttctcgctctgccaggattccatcttggcctccctctcacatggcaacactggcctttgtccatttgcaacacttaaaatggtgtgcagtccccatttcaaaaccaaatgctttcctcctaaaatagtaccactcaaggagaaaatatccttttcatgagggtgcagagggagtgatgtgcccacctggcagtgccatgcgtgctgtgagtgccccgccctcccacggtttaccttgcatcggtgtagcacataccagtgacttttgactcccacccacacagtaaagtacacagcgtcatcccatttcacagcagggaaaactgactgagagacgggggcttcctgggatcccggagctgaagcagacagacaacagctcagctctttggcctctcagctctgtcctgccctggtgacacaggcttgctccacttgcccaagactcagttccataggccctgccttggcggtggcccccactgccatgtgcaggctggggcatggagcacctcttctcagccctggaagcctgacattttcaagttggtggggtgacccggctgagcatgttccctggtgagtgagcgcctttgcacgtctgcccatcattgtcaccgacttgattgatgccctgtctgccctggtgcccctcactcctagatagcaaggccagcttttcctgggcactcaagtagtgttagaattaagtgcctcttcccaaggacacttccttcccctgccatggtctctgttcttctagcgtcagccactgtgccctggggctgtggcatctgttaataagtgggtcaacgctgccttcacttgaatatttattcttgccagtgctggggcaggaggtggcttagaggccttcaggaccagtgaggaaggaaaattagtgaagcaacaagtttgaggagcagcagtgacttcactggacttggagactctggggacactgtgccgcctgcctcccaggcaccactcttgttgctttcaacgtcagtggtgcccccagggcacaactccagtagaacacagtgaacactgcccccgagtttatgcagcgtccagcccgggattgagtgaagtgcagtcaaacaggaaaggtggcctggggagggcctggcaagaaagtggacaggataagcaagctgtctctgtttaggagtctagtgggttggcccgtctagaaacggaatgcaggaccctcagcccagaaagcagacagcctgtcaagagtgtcccttcctgggcaacatccaccctctcatgtggttcacgtgagttaggactcagcctcacaccaaaccaagacgagtcaggaggagactccaggacgcctggagggggaagggtgttgcttccagggtcggggacatccaagtgcctcctttataggatggcgaccatgtaggggctcactggggtgacccgggaagcccatcttctctcctttccttttcttctccctcccaacgcacctcttgtcagttcctcctcattcagttctggagactctagaaaggtcgggtttgttttgcctttcaccttttcctcccctctcgcctatggagagatgtccgtcacacctggtggcaccgcaggtgcactgcgtgcagtcgttctaacccgtgcccaccaccaccaggagctggactcggtgaggcttcgaggtgtcttcagccagctttggtgtggggttgtgagcccctgagatgcatgtcccgggtgctgtttgtcccacatatgctgagcctttgaggtgtcttcagccagctttggtgtggggttgtgagcccctgagatgcatgtgccaggtcctgtttgtcccacacatgctgagccttctgcagtcatcccgtgagactgggtgtcaaggaagaatgtgtttcttccccgcaccccaaaaatgtgcgtgcccgtacccgccacccaagcagagctgggagtctaacctgggtgaactctaacttcagacagcgactgcgctcaggctgaaatggtgacctcaaaggattagcttgtctctttctttttcaaggaaatcaataatacagggacaggcctgtgttgttcttgcttgcttgctttttttccctaggagctgtctatatatcttagaccaggaatggcttcttgtcttccgtgtgctttccatccccctaccccagccctccctaaatgaaattcaggttgcctgtcactcactcccacactgcagcttgtctctctagctcctagccagggacagcgtgaacccccaccaccccacccattcctccgccactgctgctcctgtctgagcacggcccctgtccctcctttcttcccggagttgctccagcctgtcccttcaccttgctgaggacacctgggtgacgcctccctgagtcaccctgtgactgcctcctccaccctcatccccagtgcccatgctttctcctcctgctcagggagagggttgctgtttttgtttttaatgtcactctcagggacgtgggttcggttgactggcattatgcccaccatccatcatgccccacgacctatgacctgtccccaccttggccaatacctatgcgccagttgagaggatgatgcctagtcccccgtgccaccgcctctatggtctcagtacaggtgccagactgggggactcagtgtcacaaagcagcaggcagtggcttcttctccctaccactcccttacccagctcggaagctgctcatgggcctctgtcaaggtcctgaggggtgacagggtcttatgttcttgcttctaagctggtgaccgacatagcccccttcacagcatgacagttgggtgtctctggccctggtagaatgtgcaggttgggtatcccttccccaaaatatttgggaccagaagcgtttctgatttcagattttcttcagatttttagaatatctgcattatactcacagtagagcatcttaaattcaaaaatccaaaatattccagtgagcatttcctttgaggatcgtgtcagtgctcaaaaagtttcagattttggagcatttcaggtgttggaattttggatttggggtgcttagcctaaaccatatttctttaccccatctccattgtctgtaaaataatgagtatagccttgcaaagacttcctacccgcagcaagccaggtttactcccgggcacgtggggaaaacggcagtgtaacttacctggttgctcatccctcaccccacccccattcaccaattcccccaggaagtgaatggagatgggaaatgatctgttgccatgaccttgacccacacacacccagcattcttaactcctaggaaccccattatatgaaaatccaaaggtatgaaataaattgggagggtagttacttgttacaaagtgattccttactttacagaaggatttgcttcagatttctcttaagtactcagtttccctagtgtatttaaatgttgttctgtgaaaattaagcatttgtaaaagaacttcaggagcccttctcttgtgtaaagggagatatccgtgtattcataggcaaaggtgcagaaccccaaagcccggttgatgttgctggagaaacaggcaggcagggcttggggtggacatcataggcagcccacctgaaagcagtaaccagcgattccccttcccctctccccatccacatccctgagctgggagagctccgcggagcttgataagtatatacccgagccccacacctgtgcacaggccaatttggttgggaagcttccaggcagggctcagtgggggagtatccatccctgctggggaccttctgcgctgagctttttcaggaccgtttctttgcaggtctcatcctgatcccagtcagaccccgagcccgaggcctaagccctccttgtttgtgagtggtgcagtcagggataaaaacccggtgtgcctcacttcccaagccacctgggctgatcctggccactgacctgtgcgtgcacatgcatttccagtcattcccctcgagaagctgagccccgggcagactcccaaagctcaacagcccagtccatcccacactgtgcaccccgctgcttccagaactcccatttctgggcaaagaactaaaaatagtttttattatatctgttaagagtacatcccagttgttgatttcagatctctccctgccaccttttttattttttatttttttcttcatttcacaaaataaaagtgtcaaaaaactccatagtctgtggaatctagcaacctcccagtagtttgagagtaacatggaatgttcttcaatattttgtgctaactaaaatgaaaactgtatatgccaaactgtttgtcttctgctccgtgtctggctgctccttttatcctgtagatcagtctgtggcatttgtggtggccctgccaagttttgtgaggctgtgctattccctgaatgatgcttgctctgttacagggtgtgtatcataagcagagcctgatgtctttctatatagcgccccagggccctagcagtaattgtttaattaaataaagcactcactcaaaagtaatagccgtgatccttcgtgtggccagtgtcccagccagcggtgctggccctgcacactggctcaaaagcagcacctgtgtgcagagaagaaatagctgagtgtgcgctgtgcagtgcaccctggccctgaggagaggagccacagaaccccagagggtttacagccagcagagaggtgcgagggactcggctatgatggcccttacacagagctgaacgattagggtgcacattaatgatgatatcggatgaattagcataagcccggatgtcttgtggattcgctgacagtggaccaaggaacattttcataagcctcaggcacaaaaggaggcactgggggtgtggcagcagataccccatgtgagtgtgactctagaagggtcttgagccaccgcagggcatgtgtagtttggcaatggcaagaacttccttcaaccatggattgagacattttctgaacaccttgatgggaagagaatgcagggactggtattgggtgttgggcactggctgaggccgggaggcccctgcggtctgtaatgtccagttctggcgccttctcccacactactgcagggaggctgtgcttcacctgagaggcaggtgaacagtctctgggaacacttcccagctggtccctttcccctggatcaggaaagtgtttctcaagatctggttgcctgaccactggcacaagagtgccttcgggctcttaataaaaatgtagatgcttgggtcctgcgccaggcctgatgcagtatattcgaaggccacagggcccaggaatccgcattttcaaccagttctgaggagaattctgtgtgcttttccctttgagaaatcctgctggcgcagatctgtcgaggtagtaaaaggtctcccggggagaggcctactctggtcttccttcaggaactgcttcccacagcaccatggtggaggcagctgtcaagggcttcccgtgcctgccttttgcagggaaaggagaggggctgggcaacctacaggtgctgccacatcctggagtccacacctaaggcactgccagagagaagaggggctgtgcgtgcccactggctggaggctgctttgtcacttgcggctgacgggtacctcccatgtccctagcgggtggtgctctaggcttcccctgtagcttcctctgaagctgctggttgggggctctagaccccgcagcgtgccagctccccggagagggcatctcactctgacccccgactagggaggaagctgggggcttgctgatgtcacttctcaaacccgcttcaagagagctcattaatcagccagcttgatatgccatctcccctccgtcccgcctccaaggttactcagttcccggtctatttcaaggccagacgtcagcagaaaaggggtggagccagctgggcctgtgcagccctctctgcagggcacccgtgttctgggcacctgacttccctcccttgcttcctccagctcctgctggagcgttcccactgccattgctcttcctgcgccgagagcatggaccgaggaagggaagatgccgagagcatctcaagtgatcgcctggcacctctccttgagtgacgcacaagctccgggcaacagagggcgatggcactgcctcctcctgttcccagggcagggcgggggattgacagctagactctgggcaccaaaagccatcagatgccagctggttactggagacgcaagcggcctcatgggttccgaggcccatgggcacacacatcaccaccaatgaatgttctgagcagttcaattcctggcagaatcaggtggttggaggtgtgggtgttttttcccaagggagctgaggggctagattgatggctcagagggtcccccatcctctgtcacttgcgacacagcccacctgttcctctcacgctctcttgttcttaggacctgtgaggatcaagttgacccctagcctggccccaacagtggtagcccagcccccagcagttatgtggccaagcaagacatgccccggccttctcactggtataagatagtggtatactgtgaccccggctaacccagacccagcctctccaggcacagccgtcggggagaataatgccgtgcacccatcccctccctcctccttgacatccagcataaatactaaaagagctgtttttgtagagagatctcaaaaactaaaacatgagagccagtaagccacgcctgtagtgcccagaggagttttggtccttggatctgttaactcggccgaggagagccgggaaaagaggttttcatgctcttcagagctgccaaaccctctataagagccctgcctttcctcacagtccctattttcttcctgccgtggggaagaaaggcttctctagagcctgccctagaaagtgggcattcctcgctctgtctcccatcaggttccccaggagggcctaggatggccttttccctcctctgtccgataggatgggaatgaaattccctgatctccccctacccctgtctatactcctagttcaaaggatcaaagtcccttttaaaaacctcatcatgttaggagtgtcccgccccacggctccatgacgagggacagcctgtcacagccccctccctggtgtgcacacccagcgcctcacagcagaactgccccagggtcatgaaggttttctgtgtcaaccctgattttagggcagtctgattgccatctccctgcttaaaaccccacagaagctcctctccagaaagcaaagtctaaactccctcacgtggcatggtctgccccagtctcctggagccttctctctcccccagacacccccccaccccaccccgccagtgtcatccccagacgtcgagtgctgtcacggcctggcccaccacgtgcctgtgccttgctttggagtcagaggagcgttcgtctagtccacactgagctcaggacccctcttccctcaccccctgccatggcattaattgggcttttatgattattccgttccttgacctcattgtgagctccttcagggcacgggctgcgtctcgttcacctttccgtctagagccagcatggcccatcgcagcgtggttgctccctgaaggttgcaatgagggaaactgcttacaggtggacgccactgctgggcctgtggcggggctttggcacacaaccctcccctgggccttagcctgctgatggccagagcccaccacagctagtggctgctgcttctgcaagacagactccatgcacagccagcccctcctttcccagtgggcgggtcatcctctggtcctcgctgccaggacaagcttcccctccgcaagtgccagagcacttctgtctttggggggcagaagtagaagggagcagctggaatccgtccactgccgtgaagtcacagacagctcgtcacccgtctctttctccagcaccaccaatttgcatctgaaattcggacagtgacggattagagtaggcgccagctccacagacaggtctgttcctcacgtcccacagctttgcgcacacatgccctctgccccaccccagctcctcacgtaacatccgtaaagctctcctaggtcaaggtcagaacccatggtcttttcacctggatgtgcaggtgctagattccgtggtcctccgtcaggcttgtgaagagccgggctgtcctctataaaccctgatggctcataatcattaggcaaatgactgtgtgggttttccacaatatttatcttccccttccccctaaaccacaagggttgcagctctggcatcaaatacttggaactctgcccaccatcgggtaccatctggcttttcagccgagaaagagcccacacaggcaggcagcttgtcctccaatgagaggccaggccaaggccactgggccagcccagtcctgccctgaaggcgccagccttgagggggccacagagtggatggcagaggagacagcccttccatcaggatgtaagcaaaggagacagttgagtgctctaaagaggaactgggtgctctaaagagggactgggctttgactgaagatgacctgtttcgaatccctgccacatctaagcagtgtgaggtttgggacaaatgaatccctctcaacctgtttcctaccaagtggagacagtcaccaaggtgcaggtgtctgcagggaggagctctccttggaagatgccatcctgcctgggcactctggtagtgcctggcagtgccagtccacttgctggttctgagcctcgtcttccctgccccggggcagagccttctctggaatgacagacatcagtctcaggtgtctcgggaagcttggagagcttgggaagggctccaggtagagaagggtgtcatgttcaggggctgagctcttgccaccagcatcccctcagtgtgagcttaataccagctcccagctagaagcttggagacaacaggcggggtattaccaggtgtgtggactcatcctggttccaaaggtgggtggagtttgctgcctgggggccacagcgtgtgttctgggcagacacaggctccctcctgcagcggccacagtgcatggacagttttctggcaggtcaaagccaggctgcgcatccggtgctgcaggagcccccagtgggtcatggcattaggttccctcccaggtggcaccttcccccacatgcctcccacgcacgggctcctatgagccgcactctgcctgataggaagtttctgacgttcctttttcaccatcaaggggttagggagaagatgctcattttgttgcctcccagagctccggtaaagataggttacaaacctcaggtccctaactaagaaattgagcatgtcatttacgtaggggtacggggtattcagaggaggtggttcagaaaaggaagtatatgggtttttcttggctctgtttccacttgccttgaaaagggggaagcagaggtttgaggaagggacctggggaggttttcggctgtcaaacattcaaagacggtccttcagccagtgtttggggagtaacagcaaacccaagaactgccttccagacgcctctggttgtctcctcactgacagggctgagcctcagagcagcctcccccaggctcctcaggagtcgtgagcggtgccacagtggctctggactgtccctcccgtgctgtccagctctccctgtctttctcggagcccgcacaggggagtccaggcagctctcgtcccatgcagcctgcgtcacagctgccatgggatggccagactcctggagcgggtgctgcttcggttctgtgcgggaagctctcacgcagccccttcatgccgcctctttcccagccacaggctaacatcgcatcctgggaggtggtgttctggacctgcaatagctcaggcaggcggtggaccagggctgcttgagagccctggccccccaggtccaagggggcaacgttgcataaaagagagcatccatccacctttcccctggtttctttctccctgaaatcattcttccaggttccccagcatcagagtcgaataacattttcacaagtatctgagcagaggtagcgcaggtgccccactgttggccagtctgtacctgtaccgagaatgtgcccagagttcatctttatctccgctagctgggcgaagggacgggtctttcctcccgaccagcccctggttgctgagctcctgctgcgaggatttggtttctttcctctgctttctagcttggtggccgctttggaacacgctgctgggaccttcacttttggctcatgattgcctctgcctggaggctcagtgtcctcccgtctttgagaagagctgtagatcttccgtctctccactcacgcattcagaacgaggctgccagcttggcgtgagcagccatggttttttactgaagataatggtgacctagtgacaaggtgcatagagctggcctctaatgcacagggggcacccacttctttagagtcatctaggcatcaaccgtcagttctgtcttcggtcatcatgtgaatctttcaaacttggagtctattcagtaggcatctcccaaggaccttctagttgaggggtttgggaagatcagggggagccaaggacaaagggccatgctaacttgttcaaaaagtgcgttatggcaggtgttgggctaacactaatcactgctgcagagagggacgtgcactgagggaggcagccagcctccgcctgtcctcatctctcactctgcaccaggtacacagtatttgagaattggtgggggcaagattggcactgtctgtcatgcttgcgttggtgtctagaacccgacagcctgtcctggcacaaatcccatcccctcccagtctctgggtcagcccattcctgggctggtcttcaggaggggcgctgctcaccctctgccctgtcgagaacattttaggaagctcatccttatatagttccttgtgaaagtgcaatcatccgcagaattcggacgacctcctctagatggcatggtgcctctcatcacagagttttggcaaataagctgtgacagtggttcatgggatttggtgcacacaggctgccggcatggtttctgacacggctcctgctctctttctctggcagacgtcttccgcatggtgaatgatcctttgtgtttggtcgggaagaacttggactgtcttaaagagcatttgtactgtagttgaacttgagtggaggtcatggaagtcaaataagaatagtactggggctgggcaccgtggcttacgcctggaatcctagcactttgggaggccaaggaaggcagattgcttgagctcaggagtttgaaaccagcctgggcaatatggtaagaccctgtctctacaaaaaatacaaaaattagcgaggcgtggtggcacacgcctgtagtctcagctattcaagaggctgaggtgggaggattgcttgagcctgggaggtcaaggctgcagtgaatcatgatcacactactgcactccagcctgggcaacagagcgagaccttgtctgaagaaaccaaaaaaaaacaaacaaaaaaatgcatttggaccatagttgaacttgggtggacctcatggaagtcaaataagaatagtagaatagtactgggggccaggctggccaggcatggtggctcaggcctgtaattccagcattttgggaggccaaggcaggcagatcacttgaggtcaggagttcatgaccagcctggccaacatggtgaaatctcatctctactaaaaatacaaaaattagcaaagcgtggtggcatatgcctgtagccccagctacctgggaggctgaggcaggacaatcacttgagcctgggaggtggaggttgccgcgagccaagatcacaccactgcactttagcctgggcagcagagtgagactatctcaaaaaaagaaaaaagaaaagaatagtattggggctaggcatggtggctcacgcctgtaatcctagcactttgggaggccaaggcaggaggatcacttgaggccaggagtttgagaccagcctggacaatatagtgagacccccatctctgcaaaaaaaataataataataataattaattagcagaatgtggtggcatgcatttgtagtcgtagctactcaggaggcttaggcgggcagatcgcttgagcctaggagttcggggctgcagtgagctatgatcgcaccactgcactccagcctgggtgacagtgcctcaaaaaaaaaaaaatagcattgacttaacattctttggttggagctccttgcttggcttcaggagtgctgcgttcccccaccgagatgtttggacaggagtgatgacttggtgtgtgctgacacagggggtcaggaagccacgctcatgtctgttgagtgtcttctgtgcacacgcagcatgctttgaggggttcaggaacttgaaagctctcgcagttagaagggacatcaggatgcaaatcctgccctagccacgtgaccctgaagcctgtggtccttcagctgacccacactgcctcagaactcaccttcgtgtgggtgaatccccagatactgtaattcaagttgagaaaataaaaacttccaaaccaaaacgttcacagccacttgagaaataaaaatagaatccttgaacgtttcttcactacacttcaaggacgtgttgaaagttcacttcccatttagggacgggctcatgctgagttgccattaaccccaattaactcttaaccccttgtgcccaccaagagcagccctggagtctgggggatcctttcttttatcgcttgaaataacctccaggatcagggagctcggctgtgcgatttgtgcgctccgcctccacccagatgagcccccctgcgccctcctcactccaagcccgagtgctccgtggtcagctcccacaggtctctgtgcgtttaaggtagccctattcaacctttcaaggcttgctgctgtacgagaagtgcctctgtcacccctgctaccttaacagagaaatccccatcagcccccagccctggagtgagaaggctcagagtggacctgctggcctcccgtgttgaaactccgggagctgacagctggagtgaagagaaggctgctggtgcctgaattcttggctctagaaactccatctcactacagcgtggaagccaaaaccaaaaaagcttcatatttttagagggaaagaaataagcacacacttagagaactgcccacatagtaaccaaccagtccactgcctcagtagtgttcatgggagccagcgggtcacagtgtcactcccctgccccgccccacttcagttccaagccttcttgccactccaggatgagaacaaaagcgtcgcctgcgtgcttccctggtcactgctggccgctttggccactggcatttgtctccatgggacattgcccgcttttcaagtctcagtcaggaggcagggctgggagggaccctcccctgggcatcaccagtcagctgacagctgcccttccaagtgttttctctgtcacttggtgcaaagggtaattgtgtgtcactctttgtcccatgggttagttttggcgtggagttgcacagaaagttcttaggacttgtcctttgttgcagccctcacttcagcccctcattctcctgtctcccctttcttgtgggttttttgttttgttttgttttgtttttttgagacagggtctcgctctgtcacccaggctggaatgcaatggcgcaatctcagcttaccacaacctcactacaacctctgcctcccgggttcaagccgttctcctgcctcagcctcctcagtagctgggattacaggcacccgccaccacgcctggctaatttttgtatttttagtagagacggggttttgccatgttggccaggctagtcttgaactcctgacctcaggtgatctgcccgccttggcctcccaaagtgctgggattacaggtgtgagccaccatgcctggcctcctgtctcccctttctaccagggaagtagcccctctgtcttccttccccttttttgagggaactgagatggaactatgagtgttgttgaatttcatcaaagtcttagttccagttggaagctgcagtccgctccgtctccttccagccagaggaaggatgacgaccagcagcacttgggtttttagttttgtcttgtaagcattttggtgggtggcggtgggtgactattagggacactgactccactgtctccagaaagtagggatgaaaaggatcactcctttcaagaccttgagcttcttcactttaggtgaagatgtcttctaagacaccacccctctgggagccaagcagactgagagtggtcacagttcaccagagtctgatccccttctttgtggggaccttggagatgctggtgatggcgggaagccgggcatcccaggcccccttcctgtggggatcttggagatgctggggagccaggcaccccaggcccccttcctgtggggatcttggagatgccgatgatggtggggagccgggcaccccaggcccccttcctgtggggatcttggagatgctggtgatagtggggagtcgggcaccccaggctcttcccgggtgcactctcttcttcatggagggaggaatatcattctccctgaagccagtgggtaaactcagagccatgctgttttgatttgatgtgtgtttcctaaaatcataacatgtcaattcctcagctgcgttgggaagagttattccctgactatgtgctgtttttaggcagagcaggtgactcttgcccacatgctgctggctttgccaagtcaggcactgccccccgcaggaggcatggaaaacgtgtacaaggcaggttggcaagactggggctgccccttcacccactctagcaggcactccccccaccaaatgcagtgcatcctacaaagcttttgtgagcatcccacgtttgagagccttcctaggtgctgcgacaaacaaggatgcagtccttgccctcaagggggttacactctgctggggacacaaaatcaacccaagagaaagcagcggttcagagcctactggaatgaagtcaggtggtatcaactgtgtgttggtaattcagtcaagagcccccagggaggattaaaataacttgtagaggagattggcacttgagcagggctcagaaggtcacaggggaagattctttgccagcaggagggtgaaggcatgaggttgaaaatttgaggacggggtgtcagagagggggaccttctccctctgccgctttctggctgtgtcactgaacctctccagccccccagtttcctcatcagtaagatgagggcatcgtcacctgcaccagtgaccttgcagcgggccatgagcatgaaatgaaaccatgtgtgttagcgcttggcagagtgtggaggggctgcagcttgggcagtgatgttatcacagggcagttttgatagcacagggcagggcggatcaaaggaccagtggctgggacaatgcggccttgggattggctgtgacagatctgcaggcagagggtgggacccggagactgtacaaggtgttaaacagggtatttaatttgagattggcaccaagtttaaaatttcattttgtttctctgaccagctaaatgtgcagagaaatttggggatggggagataagtatctacccgctttacttttgtgctctaatgttgacgccctcactcacacgctccgtggtgcggttaaaggacataacacattgccagtcctgggctccttttgcatatgacacagaagcacgcagagtcggagcctttcttctgtaagtgccatgtgctgtagggttagaactggagaggagggaggcaggtggtggacacggcacagcctcagcaggcgtgagttgagcgttcttggtttaaagatccattctcggaagtagcacagcatttgtttctcccattccatggctgggcagctgactcttcagtctgttccaaaccactccaagaggaaagtggaggctccagttagtgactgagcccttggtacccagatgccaggctgctcaaacaggcacaagtgtcagtacttccgggtcctcagcaaagccacgtcctgtccaggaaatctccaggcacagcccacaacaggcccccgtgaggctgcagggtcccttccccacatcttcgagtcactgattctgaagagtagatttccttcctgtccagaggacagaaggctgggcttgagattaggcactctctttactccctactgtgcttaaatctcatttctggtggcatctagagaaacggctcctccctgtcagccccatccttaatgcatgcgtaggactgggctctgtcctgttgggggtgctattgggagccttgccttgcaagagggcacttctggcctgggagagaacacacatctgtggtttgaagccccccagtttgtggtcatctgtgatagcagccccaggaacctcatgtagagagcaaggaaagagtcagagattgctggaagtctggagcctgggcaactggaggtgggcagcgcatgtaagggacacaggaggacaggcagccctgttgagctgtagactgcagaacgttctaaaagagctgtggctgagcattgcctgcagtgccctgggaatgttagcctccttgtctccatcaagacttcagcaaggctgctgtggggcccctggtgttatctaaactcactgacccaaaaagaaagaggatctgaacagacccatttgtactctcctgggtccgtcccggactttattccccatgaccagtttgaagatgttattagaaatcagagttttcttttttcgtttttttttgtttttttttagaaatgtgcttggctgcagcgactcgtgtctctgcctcctgtaatgagttgggctacaagagtccttgagcagagactgagtttgaactgatcaatggcatttgggggttggaaaattgctcaggagccagctaatttataatgtcatatgggctagactggaagacccaagagagtaggctgtctcttttggctttttatctctcctttttttaaaaaggaaagaaaacacaaagtgccacgcttggctgttgagcattcagagatggacactgcccctgctagaccatctggagacaggggctgttccttctcccgcccccgtccctccccaagacctcagcggccacaccgtggcgtggcagcgcatgccattgcctctgtcctcatcctttgtcactccggatgcctgctcctgcagttgctgagttctggctctaactaatttgcagaggacacctgttccttaattagccccagctcgcagtctgtgtcttcatctgggtgctctctgatgtgtgagctcgcagtcctatggaagggctgctgtttggcagtctgtgcgtgtttgctgtgactaagtgggccctgagccttcccaagcgttatggtcggtctgtactcctgagcatgaaacgaaaaagaagccacattccaaccatcatccatctatggacgttgcagccattggccagatcttccagaagagtccttcattgccagttcccatgctgagtacagacctgctgtccccagaactgggtctgagaacactaagcggatatgaaccctcgtttcgactcctctagattcatattcctggtcactcaagtggcacctcacacataccacttacaatacctttcagaggtacatctgattaaatagagggatgctgtcagtgggctgggattcatccatacagggttttacagaatggagccttctgtgtcctaggatcttgacaagcatctgccgaggacaggaacagagatggacagggcccctggaggacaggacccaggcagcctgcaggagcattccctgcctgcccctgggggtggttctgctgtccgtctatttttatggtgtaaaaccttctaaaaaccagtctttaggtctctgagatgagatctgacctcccacataagccacccccaagatctccagcccccacagctggaggaccataatttcagcgggaagtcagaggcgaactacccaaacacccgggcacaccaggagtccagtttccagcagaccacagttacttggaaacatttgtggcaggtggctctgtgtttatgcattcttctacctgacatctccctcttcatccttcaaaagagaaattcatcagtggaaagtttccctgaagtggtaattttcctaaatgacttactgatggtgctgcgtacagacctgctccgccagagtcaacgttctgcatgcgctaccgtgtccccagctcctctccctgggctgaggggacggcggaggctgtccactgcttttgtaaggagagccctttcctctgccttcccctgcccagccccatcccccaagcctgatagaaagaaagacttctttcccctctcctgagtggaagcagggccagttctgaggcccccagcagaaagctgctctttccaaagccctccatgcctggtggctgccaggtcgccttctctagcccagctaattagagcctttccttaagcggcacttcagtcctccgcatcactcatccttacagtgataatggacttggataagaggtcacagcttctcccacatcctgccctccttatggccagaggtggggggcggggggcgggacaggctcagctcctccttctgcggggctcctacctgtcagtcacaggggctggccgagggctgagcagctgtgatggattcacccagatgacaggccagagcccgactccccaagtgggcccgctccccacattcgttcaggcttccgagccgcctgccgcatctctggtgagcgtcattagcattaacgtgataaaatggcactgtgtaaatgttaataaggtctgatgcctcacactgcttccgagtggcagattggaaatggtaccatcatcttaactgcaatgagcagctcttaattcctctactccctgagcaaccaatttggcatggaaatcctaaccttccccacactccagtctctgctctgtcacatttacccccattttcctttgcaaagaaggttcccatttcccacagaccagttttctgagacagagtttgacttttgttttttgagtcaacactttcccctgttctccaaagagaaatgagaggacccatgctgaccagcacccgcttctctgcctgggtcccatcctcagcccagaacttctttgccctggttttcctagatgcagctcctttccttggtcatcccgggtacttccgaggggcctgccctggaagccaggggctctcgttctccaggcttctcctctcgaagtcaaaaacgtggcccatgcacatcccgatcactcctctccaagcccgtcagaagaggtgtcctctcctgcgaggcttcgtcagggctcctggggtccctccccactgtgtcctttcttcgcagtaaactaagagtcagagacatggctggtgcttcttttggatcctttttgccattatgtctctagcccatgctcatgggcagttcgagggtgggcacatcatggatcttcaatctgtgtttgctgaagagagcaggacgcatggggtccctggaatgacacctgggccttgcctaggaggctcagcattgtcggaacagtacatgtgagcagcagcagggaagcatggctctggagcttttgttccacccctggcactggcacttacccaaggtgaccccagggagcctctgccagtccaggtgtgcccaagtcaggcccggccttagctatgggcggaggccacgtgagcagcagcgtcttccgtgtgcagacagtctgctggtgcggcctgcaccctcctcactcttgtttccatcccccaggcgatcttcactctcctcctcggaccgttcaccttctttgacgtccagaagaccaagtacctgcagatcctgacctctctgatgagatggatcggtgagtctgagaaacagctcgagtctctgcgctttctcctctcgtcccttccctctcctttcatgagaggccgtgcagggcccccagccgtagctggagtgtggtggtggtttccattgactcaggcctgtctggtcctcccacctttccaaaggataaggagggggctgaatactcagcttgccttttactgctggggaaatttaacaccaaaacaagatgattgtttcgaggtcacatagtgtggatggagctggggctagagcccaggattgttcattctaggaccagcttctttctcatacaaccatgctgggtgcccactgacccagaggctggcaggggggctcccaaaggcctgggttgggctgtgccctgcagggcacgagagcggcgcggctctgcgttctcatgagtgtgctatgtggcataaccataaaagccagcgggccatggcagcagccactctctgcctctgggtctctggccaccagggcatgaaaagacactccctccacagcatcttctaaccaacggacactgtgctgagcatgagtgccattgtcctcagctgcggtctgggcgtctgttcccccaaacaggttggtggttgggggctggtctacttccgccacaccatcctgccagccacctctgggaaagggccagctgccgatccacctggacggaggacaggagcgggtggggccctctgtggccagcacggctttgggcgtctgttggacccctcttctgctcaatctaaaaacaaagaaggctgttgctgttctgagagaggggcctggacagagtgggtgtgtccaggctccaggagcttgcctgcctctcagcacagaagcacttggctctagaggagccaaggctggggctcctccttcctgaccaccttccccagccccgtttcccactgtgctcgcccattctaccctcatccagactctgggggtgcacgctgatcctgattccatgccaggactcagcagcgggtcatggtcgccgaggacactttctgatctaaatgacttccagcagcttgacatctgcaattcccctggttccccagtctcaggattatgagatgtcagtctaaggagcctctgtacacggcagtcttggcatctttagttggaaggggccacagcagtcaggtagccccgcctcgcccctctgggagcaggctgtacagcacaggggacagggtggcctccggggcccagagctcacgactggatgaggctcccactccactctgaggggttgtatgtcagtgctggaaagtttttccttgccttgagccatgctcaccagcctgtaacttctttgccctcttggtttgtccttgcaaggagatgagagcaggatggagatgagttgtgaggcccccacaggggcacatcatctgggcctagcccgtccttgggcatcaagctgacacgagggagcgggaggacacctgtccatccctagacagggcggaagtctgcatctgccccattcagtctgtgtggtcacatactcaccagtgagtgccgttcccaaattgcactcacaagttccaaagccccaggttaaattaacgtgactacctgggggaagatgggagttgttacttagaacctggggatcccaccagctccaaggaatggatttagaatggagcctccctgggtgccaggagggattgtgtccagaagtcagagtcagcagggatcagaaacaccagggctcagccgtccacccttcctatttctctgcttatatgaagtatttgagagctctgggtaaggccgagtgggtaagacctggtggtctcagaagaaggagttttctcagtaaagcaggatttagagaaaaccgttctccctccttgccttcctggcctaagtctggtgctccagctcctgtggctccctgcagccacatctgtagccccaaagtctggcccctaccctgtgtgggactggctgcacttgacccgcccctcagcactggggagggggaaagggccccgtgggcactggcatggagaaagctgagctgattcccgtcccttcccctcatccaggaggacaggaacaggctggggagaggtggagggggacgttcctgctttagccggcatggggatgacacccaggatagtgacagttaatggcttccgaagacccctgcacttgtttagggtgacagattcctccccgtgtctggggagcaatacatttgttgaaagggaaaagattgtaaaaaggagaagaggaggctgagggcaaataaagagcgattgtctcagagcaggagaccagctgtatccctgcatcagtcagaggagaagccaaattctgtggccagcagggccccggggtcctggaaggcgtctggggacagcccgggccccttgccattctgctgttggagaccctgcttccccagagtcaggctcaccgtagacttggctttagaaaatcaactcctgtttcccccagccccttcccacccccaggtctcccaccctgaggctcccggggccctgcagtgctgcggagcaggtgacagtggcctcgagagaggcttttggcagcatcaggagccggaggtggagaccagctcgggaaggtcgacagcacttgtttttttggtggtgacattgttgtcttagcaagtcatctgcctcttttccttttgatccaagagataatcaaatgtcaggagcctctcaggcgaaccttttctccagaatgctgctgggggcgacagcaaaggcagtgattttttctccatgagagactcagacctctgggattaaaaagcaaacctttctgtggcacagccctctcgccagaagaaaaattacccagttaagtaaactctgaagcgcagctgggtctagggttccattccccagcagccagcactggaaccagcggggtatttttcttcccagtgctggcggaaggtgtgtccccctcccagccccgggcagcagcgtggctcaggaggggacgaaggggatggaggtccccctggagccaccaaacaaaacaaaactggcagccccttttgggggagggaccccacgagggtttctcgcctctgggccaagctcaccccaggcagtttttcgagaaccaccctaaaggcagtgacctcaaaagcctatttgtcctctcaagtctgtgccaagttgtcagttcgccacaaactcccttttcattctgtcttaaaagcagctgtgtgaccgagtcccacacaccccaccctccttcccacactcgcgccgcaccccttcctctcccctctccccagatgaggccatgctttcccaataaccaagtggggagctcggggttggaaataagctggcttgggttccaggaagacaaaggggaagaataagcaccaaagggaccggaaaatcataaataaatgtgctgagccggaaactttcttgggcttaattaggaattagttctgccatctgttgaaatgaggccggaggagactgcaggccctggagctgtgctgaggagccttcgggccagctcctccaagggcctctgctctgccctcattccctttagtagcctcggaagccccatcgttctgccagaatggcactgaaagggttaaatggcctttgtaaatagccacttgtccaggaaaactcaaagcatggatgacatgtgacagtgtctgttgatttcttgtgctccccaaataagttctggggagactgggctggtcagtgtgggatgcctgggtggcagatacctctgaatccacatggggaaggaaggtcttggtgtgctgtccccagcagtgaggctgttgttcaggccctggcagacatggctggctcacccccaggtggccaccgcagattcctgagcaatcaggtctccggtggctgctctgtgccaggtggcgcacctactggaggtcacgccggacctccttgccttgttccccccgtgtgggacaggcggcatttactcccaaggtgcacagttggatcgaggcttctccgccaagttccttgtctgtgcggtggcagcgaggccttgaatggggccgtgttgttagcgcagcacctgcacagtgtgcagagggggccacggtgagcatgaccgtcttcagcatcatcttggtcagctgccacatcccaagagtggcctcaagatgagcctctctgggggctggccatgagactggggacatgacctcagctacctcaagagagcaggccctgggtgtccacactggtgtcacggtgagatctaggagcacccaggtttgctctgggcagcctctctgttgccacatcccagctgtggtgcgtggagaggaggcctctctgctccgccgcccccagcatctactcccacccactttgaggaagctctgagctgggagaatgaaaggcaggctcatctcacagaggggcaggggctctagcctctgccagccacaggtagaccagggatgctgaggggagacgcagcacagaggatgttctttgtgctcacaggcccagcgcagggacttcagatcccaaatctgagcacctaagccgatggcgggaggctgcccctgccccgccgcagggagctctcgggctgaagtattggcagcttcattacttcagtcccattaccaactttcaccgacagatgcctgcaggcgcctcccatgaacagctggcttggtgcggggcgccccatttggggttattaaaatccggattctttttaacaaaggctgctctggagtgccacagccctcctcgggcctgggctgccgaggaccgcagggttcccttccctctgattgtgtatgcggagcagacgctgcacacgctctttttgcatctgtgttcccctcaaagtgggtcagacaccgtcctcttcaggcgtttgtggatgaacttgagcctgcctcatgaagttctcggccccactctctccacctccctcagcaactgccccagatttgttttccaagccgacagggagaggtgggacatggtggtggtggcaggtgaggcccccaagaggaagccatcacctggggacatgaggctttctggtgtttacctgtctccaaacccatgactgatccctgcagacagcctcccagtgggactgcgctgatccatcaccaccggcagccaggggtctcgtgtctgggccatctggtgcccactgctgccagcttggtgttggaattcctccaaccactcaactagtgcctctcagaggtcccagaaggaccccccaaaatgccccctgtgcctccatccagacagcctcatgtgccagcaccacgccaccctgctgtcagcagccctgcacggcccaggtctctgcggcagccctgcccaccctccaactgggccactgtccagggctctcctgggctgttccgtgtccagtcatgactggttacactcccagtggagggaatcttgaaaaaccttttgtatatgtttcattttggtcttaattttattcttggttttctagaagttctttttgcaaatgcacagaggcccatttataggagaggaacccagtgtttctgttttaaggtaaagtgggcaggtaatgaacgcttgctggcaaacagccagccatgtgccgccaaatgactcccttccttagcatcagtcaggactgacctgagagttcacttggcccgagcaaagggtgttgcccttgcagccgtacctctcctctagcagcctttgttatcagctctgatctgtgtacggccgagatgggcagatccagctaccagacaaagactcctgcagtgcccaggaggtcggtggcccagctgtccgggcactgacaaggcaaggaaactaagtcccagatcactcgtggttgtgggtcgagtctgacccgacgatggtgatggtcatggcctctgtgcagaactgggcttcacgtgggagggtgagtcttaaccttgcagcaagtcaggccgtcatatacatctgcagggctgccacggcccacagcaaccctggagctccagagttacgttcagacccaggaggggccacccatccttgctcggtgccacctttcatcttcctcactctctccttcccgtctctctctgcatctagctggctgctggagaggaaagggctgagcagcctgcaggaaaggtgacagcgcctgaaattttatgtttccaatctccaggaaggagattagtcagccagcagccagaggccctgccttcccaatgattgcacactgagcttgctctgacaacttaagaatgaaaaattgagaccctgccctcccaggcgccacctgccaggctccgagggtgtggggaagtggaaggatgaaaggccagagcccgtgatttctgacggaaggcttgattgctccagaggctcagacacttgcccttcaccaggctgctgccacctcctgccaccctggggagagggggactctgctctcagtcctttgggctaaataatttagccacaggatagaacctcgtcctataaagctgcttgtttcagcactctcctcttctcccggggtgaggagtgaacgaagctagaatcctccagaaagcacagaagctggcccacatgggaagatcagttggctttagattccctcctttcagcagaaacccaagtgcatggtgggtgagttgctaggcaaagctggcatatgctggatgccctacaggtctggaatgaaaaccagacccagggccaagatgcttttggtgcctggcacatccctgtgggggcctcctgtagtccccaaagggagctcctcccaggcagagccctcacccacaccacagcccaagtgtaggcaggtgccaccccaggaaggatgggccagctcaggctccaaagaccctgtctcctttagcccctcccagagagggcacacacctggaggccccagaggtggggtagtggggattgcctggccttgaggggccttaaaagatgctggcggtggtgggggtaggcgggggcgtaagaggaggaactgagggtcactctggttggcagagcaggggtgagcagcctgttggggtcctacttgccctcctccccatccctgacccccagagccccaaaggtttgctgaggccagtgataaggtgttcctgggaactgttctgacagcagcttgacctggccaggaaggcaggatcactagtatcatccagtccccctcgttggagcacaaggggagctagatgagaactcagcactgacacagttttttctgcttgcctgggaactgggctttcagcaggggcaatgggtttctgcaatgatagaaggcatgtgcagcttcctgagcgattgctgtgagccaggttttaccagcacggcactgccctgtctcactccaacccttcagcgtccctacagtcatctccttttttttttttttttagacagagtctcgctctgtcgcccacactggagtgcagcagcacaatctcggctcactccaacctccacctcctaggctcaagtgattctcctgcctcagctttccaagtagctgggattacaagcatgggccaccacgcccagctaatttttgtatttttagtagagatgggttttctccatgttggccaggctggtctcgaactcctgacctcaagtgatccacccacctcggcctcccaaagtggtgggattacaggcatgaaccaccgtgcccggccgcatctgcatttttaaaggtgataaaacagtttgccccaagattacacagttaagtggcagattcaggagctgtgcccagtgtaacttggccgtttccaagccaggactgtgtcctagtgtcgctcacacctctaggctgcaggatccttgggctcttcttccacctccagcctgcaaatgtgggtctccttctgccgaggtcagtcccattatttaaggaacaaatgcccaatcacctccccctgttttagggccaagaggctggtctccagtggttctctgctcaggctggtattacgcacccaccccttccgaggcccagctaaagccaagagagccctgcagcccggcaccttccaagggctaagtggtggtgaaggagggagctggcgccaagtcctcccctagtcctgttccccgcctggagtgccggtgcctgagctggtgatgggcacactgccggccatttgttatcattagccctggcatgttgattctctgcttggaaaagagagtgccgctcccagacagccaccgtgacggatggcctccacctcacagtgtcagagccagagccacacatggggagcagggaatggcacggggcttggggcgccctgacctcagggacatctggagccaggttcagaggtcagagagttgtgggagcagctctccaggaagcagccctgccaaggcacagctcagcactggcgtgtggaaaaggcctgggggcccatgcctggaggaagacccttcacccttggccctcagggtcatggctctgagtgtgtgtgcacaactcggacacccaaagggattagggaggaggagtgtgccgcgtgcggtctggccctagtggatgcatgtcctcatactcctcatcccttccaggccctgtagaaggggatgagcgggctgggggagggggcttctgggcagggaccgttgggcagggccctctatggctcccaagagcctctgttccagctcacatccttatggagatgtccctctgatggtggcccaggaccacaggccagttccatagcaccccagacccagccagtgcctccctcaccagatcaggctgccctgggggtcacagcccgggggtactcagagcccatttgtccttgggcttttcgagaaggattggtgcagcgtctcagctccaccctaggtcttcagcgtccccatgcaaatcagggcagatgacagggttagagtgaggagtcctggaccaaggttggtggcaggagggggaaatctttcaaatccttagcatctcaggtgcttcccaggtacgcacacatccacacagcccatagacccccagcacaggaaaccccactgagacacccatagaaatacaatgccagccacctggggaagtttttaatttttagtagtgacatcttgaaattcagttcattttgataaaatacttaacatatcaaaaatatctttcaacatgtaatgaaaaaaatgacaagtgggatactttacgttccttttccacgctaagtcttttttttcttttttgagacagagtctcgctctgtcacccaggctggagtgcagtggcgcgatctcagctcactgcaacttctgcctcctgggttcaagcaattctcctgcctcagcctccctagtagctgggactacaggcgcccgccaccatgtccggctaatttttgtatttttagtaaggacggggttttgccattttggccaggctggtctcaaactcctgggctcaagtaatccgcccacctcagtgctgggccacacaccaagtctttgaaatccagtgtgttttacacctgagcacacttcagtttgagccagccatgttccagtgctcaggagcctcggcctcgtgtggccctggtggtcagcacggctctagatgcttctcggtgcttctctgtcagagcccaatgggtttgttgccaccttcagggagagcgtgggcggcattcaggctgcccagaagtagcccttgcttaattccagagccagtcatggggatgaggaaaacaggaaagccaccaagacggactcagtgcctcagcatcgcatgctcatggggaaagcttcatgtgtgcccccagagcggaggtaggggctcctgggatggctctttctgctccacccctccccgcccaggcctggagagctctggcccctgtgccccaactccagtggtgcctgggaaggtcacccaactctctccagccccacacagaccccagcattctgtaaggaaggcggagtcctgcccaggcctcacatggctcagagaccaaggcagcactgcctgggaggacctggaaggagctcgtccctctccgtacctgcagctcagccagcccttatgttgatgcccaagggtgtgtgttcagcgctggaaggaaggggctcgctactgaccactctgatctttctgtccctgcccacagagaccgaagagaggtgagctgggggtgctggtaggactccccgaacatgagcatcagggccctgggccccaactccagacacctactcatccccatctggccccaagaacaagtcaccttcagctgctacaagggcttggcccagtcacggcttcatccctccaataaggcccccttctttccccaggcccccagggtgaggttccaggagggcagggatattctggaagggagggagagatgttgactttcatccccttataaaccagcgccacctttgccgtttggcaggtgttcagagtgggtgggctcacctgtcctcctccctgccaaggagagaggccgtgaggacagatgtggaggcagtgcctgcagggacttcttatctggctgttgccaggctgaggctgtctggggaaaggctgcttctcttcgcttctcttctgactgctttaggagcctgaggactcggatgttataagaacatatcttgatgtgaaattgctccctgaccgccacgcttgaggttgcggtaaagccgatattaacaagaaccttggcttgtccagatgcccgtacactggatgtgcctcctggcagctcagtccttgtgtaaattttacttctagcctcctcagaaagggaaggcaggcaccttctctgactggcctctggcagctcaggactcgtgcctgttttatctcagctccaagacaatgacttcctgtgccttcgctctgtcttcctcactccctccccaggtgtcagtgtgcgagggaggggagtggctgtggcccaggtgaatcagtgtggcgaggcctgcgtgtggagctgagatccactatcaggatgagcctgtgagcagccagcagccttggcaggcgacctcgcggggcctcagtgaggctctgcctatgggtgtcctcgggggcccccctcctcgtctctaccccgcattgagctgctcctaaagcatgaggagtcacagcagccacagacctatagggtcggaacggctccgaaaggtcctccacgtcccgtctgacacctgcttcccctctgggacccccaccacgtgcctccttccctcaggcttggccgcctcccgcgacggggatctcatcatgtaccccacagctagtgtgcctgataaccagcccgttctttggttataatttgtcccctgtaccttccacctggactctggtaccctggactctgggctccagaaggacaggacccctgtctcagtgtgctgtccccagatggccagcatagtgcccagcacccaggggaaactcagtccattgttgttgaatgaaggaatgaacagtccagttgggcccatgggtgacacaagacaaatgcggtggcttttgcgttggcttttactcagatattaagagagaagtcttctgcctccccttgtcattttgtagctgagccttccgaggcccagcagccgctcgtgtgacctgtgtcagcctcctcctctgtcctcccctctgcctcctcccagcttctcactgctgctctccaccactcagagcgggactcccagtgtgcaattgtgggtggatgtggatgcggatgttctgggcactgcctgtgataggctcttggggaactgcaggccctgctgggggccgacccccctgcacatctgactgtgaagtcctgggtgtctggtccttagcatgtctggggagcactttctgctctgtcccgcctccacacccgtctggcttcccacgcagcctccacgaggtgggcgcaggctgtcttggcggctgtggctgagccccgggcgtcggtgtggctcttggagccctgctccccatcgcgcatcctggcagggtctccataacctgtcatcctcgtttcatcttgatttatgatcagacctaatgagtttttggagcagctgtctcccagggatgtggcgatcaatctaggagatggctgttgaactttgctcctcccgcagccaggggaggcagggaggggccagacaagggggtggggccacaggagcctcgccaggtgggcagtgggggttaagcctcgggccatggtcccaggactctgcaaggtcagggccctgacctcccctctgtccctcccttcctcccttccttcctcctttccttccttttctcccttccctccctttcctccatctcccagggaaacgagcttctagatggtgctagtttcttttgaatttgctggtttggagaccaggctggaacagttcccttcactctccactcccaggggacagatcccagcacccgccttcatatcctcatggtggtgccgaactggagggccctgccccctccccaggtagctgggttcaccttctgcctcaactggggccatttccactgggaagctggtcctcacccctgttttgggggcgtggctcttctagaaccacctgtccttcccggatatgctcctcaccatggcggcctctccccctcctggtgtgtgagcgccctgagtgcaggtcaggattcatgggtgaatgacccacctctgctgggtgcacactcggtctgctcagccccagagctggtggcatctccatgcagccgagctgccacacagctgggtgagcttttgacagcagtgcagggtgtgaccaaggggagttcacgaaagcccacatggccctgcagctgcgcctgccccgtcaggtgtttatcccactttctaacactctggaatcacctcccaagagcttctagcatctgcttctgactcgtaggcggcagcaaacatccagcccacgaaggtagacttggtttttgcaaatagacttgtttaagacaatcaaaagaatgaaatgggtgactaatctaggtaatctaggtagtggcattacgaggtgaaactaattatggctagaagatcatgaaatccttttttaatcacccatatccgtggcttgtttgtttgtttgtttgttttgatggtggagtcttgccctgttgcccaggctgaagtgcagtggcacaatctcagctcactgcaacctctgcctcccaggttcaagtgattctcctgcctcagcctcccgagtagctgggattgcaggtgcgcgtcaccaagcccagctaatttttaggagagacagggtttcaccatgttgccaggctggtctcaaactcctgacctcaggtgatctgcctgcctcggcctcccaaggtgctgggattacaggcgtgagccactgtgcccagccgccatggctttgttctagctgaaggttctagaagttgttctacatcattgttggtgtcaaaggtgcctcttcccaagacagctgctctggaggacgccagttagaaggtgtatgtttcaggggtgtatgtgtgtgtgtacagccgtctcatttctttggaaacctactttataaattggtttatttaccatgaggaaatcccacagtcagggctgtaaggagagctagctgcctttctttggagatgtgaggctggggagttagaggagcagagaagcacgagctgtgtccagggcaggagagagcagtggcagggatgctcacgtccagacagctgacctcttcctgccttcttgcctgcttgctcaccagacccagggcccagggccgagtgacagacagctagaggaattctccacttgcctttttctaagttcatgccagccttgggcagggccaagtgccaggtctcaaggtggtacctcgagatggcagtggcagtgcaggatttgaatcttgccctacagcagctgcccccattgccctgacccttgtgccccacttatggtggcagaacagtctgctgcagcctcctgaataacaaatcaccaggtgccccgggcccagtctggcctctgtacccccaccccatcctgctcagctctgctctgtagccctttctggctcacagggactccgcctccagcctgtctgctctctccccggtacccctcctgcacatcctgccctgacacaactcctgtggggtggatctctcacataggcacagctgtgcacacccccctctacccacccgcagaaatctctggggcaagcagattgctcagggtcctgggctgtcccacaggtgtcctgtgccatccacccccagtgggtgaagctggaggcagctccctgggctgagactggaaggaggaactaggtcgccgcttccgcttgactgaccagggttgggacgatttgtgatgtcgggggaggaggagtccccaggccctcagagtcaggagtggcggggactggagcgggcggtgagaggcagaaacaaatcatcttctttaccggcaattttctcaggccggtttccacgctcccctcctcccctcctgtccccgacagtgtcaggcagttctgattaaaagtaatagatgaagattccatctcactcccagtgtcattgtgggaagacattgcctggtttcctgtgggtcccatcagaaccacctcttccttccaggagtcagggagtgggcctggcccaaaggggaccataggatacccagcctcccacctgcaaaagagccctggggctctgcggggggccccagacaggagccaccgagctgtgagctggcctctttggccactgccccttcacacttgcctgtgctgctcaccaggaaatgtcacgtgtccccgtgggcttcacctgaggggtgagggcacaggctagagaggctgtcagatatgttctgaacagagagagcagggcttggtcagcttcagaacagacacggacactggtggtctccgtgtgtgagtagctaaccacggttctgggtagcccggagagcagaagcgggagacacagaaagatctaagagtgccatctcctcagagcactgggaacacagccccttgtccctgcggtgcgcaggctgcctctggggaactcagcctggagggcgtgctgtgagcctgtctccagtggcagcccaggaggagggtcaccgtaaagggctgcgaactgaagccagcctggtctccatcagcaacgcaagctgtttgctctgaacagatggggccacaggcccccttccacttccacagagggtcccctgtcccctagctgtgctgccaggcccaggaaaacagagccacatgccacctgcctccagcctcggtgtcagcagctcaggactcggcagtccgcagccttggtccttgatgctatttctgccctggcgtgaccactggcaacttcctgcctgcccttggcccctaggcactcacctgtctgcccagggctcccagcactcctgcctgtcggcctcagctgtgtctagcagatgccctcggcccaggaggacacctcctcccaaacactccatgcccttcttcgtctaccccccagcactccagcctcacattccttaaaccaagggagagagggtgaccctgtgtcctgacccagcctgctccctgcgaggaagctggcagagcccctgagagccctgggggtctgatgagggagccaggcagtgcctgcccaggactggccctcctctaagaagacagagttgctacctctgcaaagccggaccaccctgccactggccccactgcagccctgtccccacatacccaggccccctgctcagcagggagaggggagaacaggacagagagggatgcgggaccttcctctgatgagcagccactgttgagccacccaagaacagggctgcatgaacatgcatttaatgactctttctcacagggctctagtccccgcaaaggcgccccccagaccagaaactcaaggtagggccgtgcctgtccccaccaggtgactcctctctctcgtttcccagctttcgccgtcatgattgtgctggccctgatccgcatcgggcacggacaaggggaggggcacccgcccctggctgacttctcgggggtccggaacctgtttggggtgtgcgtctactccttcatgtgccagcactctctgccatccctcattacccccgtctcctccaagcgccacctcacaaggctggtgttcctggactacgtgctgatcctggccttctacggcctcctctccttcaccgccatcttctgcttccgcggcgacagcctcatggacatgtacaccctcaacttcgcgcgctgtgacgtcgtgggcctggccgctgtgcgctttttcctgggcctcttccccgtcttcaccatcagcaccaacttccccatcattgccgtgaccctgcgcaacaactggaagacactcttccaccgcgagggcggcacgtacccgtgggtggtggaccgcgtcgtgtttcccaccatcaccctggtgccgcctgtgctggtggccttctgcacccacgacctggagtccctggtgggcatcacaggggcctacgcgggcaccggcatccagtacgtcatccccgccttcctggtgtaccactgccgcagggacacccagctggcctttggctgtggggtcagcaacaagcacaggtcccctttccgccacaccttctgggtgggcttcgtgctgctctgggctttctcctgcttcattttcgtcacggccaatatcatcctcagcgagaccaagctctgatggcaggacaggcaggtctagtgacaggaggcataggggccccagccccacccctcgcccgcagagcccagatttagttgctcccaggtcttcatggggcaggtgggactgtggctctaggggaaaccccctgtccagctggggttgttctccccacccaccttccacccagtctgcacctgtcctcactcccccgggcagctctcccaccaggtccttctgcctgggtgacgcgtggctgctcccaagttctaagactcattactggaatcacacctctcccacatcttccaacacgcttcacccccaaccctacttccagggcgggctactccctgcacaatgggagatgcagtgctggcactgccatcatttgtcccagacccatgcccctcccctctcctgccccatcctgcgtccttgtctaagaaacctccactagcagctgctgcctcttcagaggcgaatcccaggctggaagtatcctagccaggtctgcctgtgacggcagggcccaccctcccaccaggcctgggaggcggtaggtgccacctcagagagggcctggctggccccatgacaagaacaagaagtgctaactggtaccagagtccccagatagagctgcgagggccctcgctgtgggcgcgagctccggagtagcaggctggatggagcatcccttctacagggacacagccgcctgccagctgggcctaaagtctggagcttgtctctgaaagggaccgtctgctgccctcgctgccccactggagccctcagggcctcctacagtgcaggtggtcctactagagggaagccatccccacctggcacctcagcggcttggcagtgacatggcagtgggagggctctgaggttcccaccctgacaatggtcaggctgcccgtgctcccactccaacactaaaagcggctcccttaggggctgagcgtgggtgctcagtgttcacgctatatcccttgggcaatgtggggttggatggggcccccacttccattcccatggaaggaggccaggtccccagccacctcccactcagccatgcacgcacttgctgggctggcctcctgggaaacacaggtgactcgaatgaactctgcattttcaacgtgccttctactgcttcaggacctgggggtccccctgaccctcactggcttgcccccagccctgggcctggccccacctgtcctggagcccagagcccctggcctggagctacctctctggggtgggtctcaggccccacccctccctcttttgagttcagtgccttgctcagcccctcccctgtatctcagcgtcttcagacctctgacagagcgacgatgtagggtctcccggggcccaaggtggtctcagggtcaggggtgggatttgcagggaactcggggagcccacgggctgcgccacctctgccctggcagctgaagcctgggagagtccctgcgtggtgtaattggcctcagcccgctttctctgtgccgtcgcacctcagtgtttctcatagcttgtccccacgtgtcactttccatccacgggaaaaacaaatgccccttctccatctatcattgcgacttcctcccaggaggcctctcaggttgggtagagcaggggcctgcagtggtcaggccaagagcaaggaagacctggctgccccactgtggctgaaaactcaaaacatctggaactacccttctccaattacgttccctcttgcttaaagacaaagctaattaaatcatcctgccacccgaggctccaaaccaaatcttggacgcaaattcattagcttcataaagcccaggttgatttatgtgacagtctggaaccgcccagccatggagtcggtggccgtgttccctgccctggagggaactggccagcagtgaccacatcgctgatgccaagtggggaccctcaccactgccgttgtctagctgctttgctcctcagtgtcctcctgctgtaagtcagatgaggtcaccttcctctccatcgatgccaggcttctgccgctgacggccaatggggcttggggccaggggcagagaaccccaacagcaagagagccccaggtgatgctggctctccacgtgcatccggcacgtttcactgcagccatcatcaacttggcaaagtaggcaagctcagcttgtggtttccattttgcagatgggcccccggggtcagtgatgggaagagcagaagaggatgccagcccagcctggcccaggagcaggtgtcgttgtggaggaaagcttaaactcaacagcctctacccaacatctgccacctgcatggccccagatgcccccggtgcaggccaggtcaaggtgggagtaaactttctttgcctccctccccacagaagcaccagacccacctgagccccagagcctcatgccagcagctcctggctgttcctcacctgaggctagagcagcagctgccagcttatagatggggcggatggcaggtgatagactgggaagcactgctgggtggtggaggtgggcagtggcaccatgacgggcccctagccacacagctgtcctcactacggggcagggagcagcctcggcaacaggcaaaggccagagtcagagtggtggggaggacaggggctgctgccccgctcctggaaagccactgcagaggggcagtggctggcagtgccaggcctgggggaagtggaagcgtcctgtctgggggcagattcccaagcaagggtgacccatggttaagggccactggaaagctggagagagcttgggatcccttccacctggggccaatggtgttgattgcagactggaggggtaacctccgctgagggtcattatgtgccaggcatggcattgggtactttctgcattgggaccaggcagccgggcctgccatttgaggcagcgagcctccgtgacctgtcctccctcatttgtaaagtggggtaacagctatgtcactggccagttgtggggattaaagtgctgagcttagtgcccagcccaaaatgctcaataaagctattcagtgatacctgtttcccacatcactcaccagccataactacttgtagccagggacccctgactcattaggactcaagacacctacctggtttcatagccttctaatgagttgtcgccgggttgcaattcagaaacagaaaattggtctgaattctctggagtctagagggctttggggataggggttgactctggttccccagtcccttaggaaacttgaggacagtcctcccctttcaaagagcaggacaggctaggctggagggtcctggctgaagacatcagcctgcccttttgcaagctctgccctcctcccccacacacacctggctccctgcagaaagctggcttggaccacaagccgctcagctagacacaaggaaaaacagctacagcagcaacagaagggaccccagttagtaagattttcctgctctgaggccagccacaagggcctccctctttctgtacctcacccaaagaaaaacaatggtatttgagcatgtgggtcgccaggcccttgtttatgatgctttcacatctatagccttacttctctctcctctcccctgccacgctttctttccttcccttggtggtgcaggaagccaggccaagctagttctgaactcaggatgcagccttcctgctacctgtcccccaggactcatatcctcctgcccccccccccccccccccggccacaaatatatgcctagagaaggaacaaggcagccagtgcctggcccaggagcaggagcggccctcctcagagccagcagcaggctcggcttcacattggaggctcagctcttaatgatctttccagttcttggttattaatgatcttgggcagagagcagagcagccctgtcctcacagctcctccaggatgcctcacctgccacagccttcctcccagggccaaaggcagaccctgactctgggaggaggaggggctcggttccaggggctggtggccaacagttaaccctctcactactagtggctgcaaccaaggtcaagctcccttccagagtgctggcctccagcactcacctagacacactcccagcctgctgtcctgaacctggatccagcccataaaaacccatagggtagagagcgtgaaattgtgtggacagggccacccactcttggggtactctcctaccaagaatggaggtgtatctccccctaccgtttcagctgccttcacccctaaaactaacccaaaaaaagtccagttctcatggccccaacccaaacagtggggtcttcagagactaaagaggcagcctggcttcctgggaaccagcaaggagctacgggggagggcactggcagagacagccagcaccgcccctcgcagcttcctctctgtcacgtggaattagcctctggcctgcctccacccaacttgtcaggacagccagggcttggcctttacatcttcagccgttagaaaagggtctgacagaatcaatagtgctcactgtttgtggaacggatagaaggaatgcctgcttgctccacagtcattgtaggggggataagtgtgattgcagatgtgaaaacattgaaaatggtaagcacaagccatcttttcagatgggccagaggcaaagatgtgtgatagaaaaaggaagtgggctagaagccccagagggagaagaggatgagaccgcaggcagattctcccaccacaggagtcctggcaccagcgaggccaagctgtgcctgaccctggcagccacctgccccaggattccagagcccaggcagttccgagcctcgtgtgtcagccacggagagaatgcggccagccagggtttagcaagcctacaagctccacacctttctctgcctctgcctctgccaccatggcactgtcaggctccccagggcgtccctggcagggcaggacaggacagccactacccctggcacaagcctcccttttcaaggagactgagggatgaacgccatccatcatcaccagagcccccgtgctgagcacacgtgttacatccagtgccaggatgggtgggagctggccctgaataccaagtggcttctgctgcccagagccccctctcagcctcacctccttcccacatccctcccagacactcccaaggctccgcctccccaagagggacctgcctacctgctttaggcaaacatcccacctgggatactctcatgatgccctgttgtctatggcctgtgctgtgccccttccagaatgcagaatgaagcagccaggaccagtgtgttgtaaaaggttggtttaatgtcccagtgctctgatgagaagaaactctagccaggtagagcaaggatcgggatggccctgcctcaaccacaagttccagcctccatgcccacagcagccatgaccagtaactggctagccccagggaagggagagcctcaggagtctgacccccacagcacaccctcctggcagaactctgcgtgagaagaggacagcaaaagcccagccctcaccatgatttgaggctactgaggtcactgatgaccatggaagacatcatctgtcactggggtcccatggccaggatttcatggcagaagccagaaaagcccaatcctgcctgccgcttaaccctgacagtggcaggcagagaatccagctggctcggagcctgagtggctgataactcacacttctgactccagactggagatccgtctccaggtgcagggtcccgggaagccttgcgtcccacgggctaccctgctgatctcgtccagtcccccactgtctctgtagcctgtgcccagccccagagtcctgcccctgtgccccagaggcccccaggccccggagagccaggagccgtggctggcacagggtggaaggtgaggacagacagccccccagcaaaatggcaggtgggcgtgggcgtgcaggcagacgtgctgtctgtgctgccaggcgggggcccctgcctgctcgccctcctggcaggcctcccggtagatcggcaagcacatcgactgcgcctgcgccaagcgcctgcaggccgagtggccgtcggggcgggcgcaggcggggccggtgcacccagcgggcagcgagctgggccgagcgaaggcctcggccacggagctgggcagggaagcgtgacgcgggcgcgagccccgggcccaggccgcgtgcagcagggcctcccgccgggccagctgctccggaccgagcagcggcaggtcctccagctccgggaagagcgggaggaaggggcggccggatcggtcggctcgaggaaaggagctgtagtgacagcgcgcgggcgacaggggccgctcggaggccgagaggtgcctcccgcagtgcccggtccgcaccggccaccgcgcctcccaggctgggcggcgcgacactcgggagacgtcggacaggggcggccccggcgtcggggggcggcccgggggctgcggagccctgcgcacaagcgccgcgcgacccccgtctggcggtccccagcccgtggggctcggctctgggggcgggtcgggggtgggcaggcatgggctggggccagaccgcggggtcgggcagggggacggtgggggcgcacggcggccgccaccccaattctcgatggtgcgagtggcgcggtccagggagctgcttacgcccgccgtggtcaccatgtcgcgggctgcctgcagcatcttgagcacgctggcctgggccgagctggccgtgaggtccgggctggcctgccgcggtgggctggcgaggctctgcaccccgctgaagcagctgtagatgccctgggcagtagggagacgacaggccgtaagcagcgccctccgctcagggacccgccacgattgtccctgcctggtcccaaggcatcatcagtcttctataagtctcaggaagtagctaactgtgaagcatctcccatgcgccaggcactgtgctttgcagatgaatgagtggtctgagcgcccaggttgactcattctcctaatcactctagctagcacctggcacatgaaggttccaacctgggcacacctgtgggggggactctgaccctcttcaaccctgccaccctggtgagccatgccacttctcaggacgttggcttttttttttttttttagaaacaggatctcactctgctgcccaggctggagtgcagtggtgccatctcggctcactgcaacctctgccttcttggctcaagcgatcctcccaattcagcctcctgagtagctgggactgcaggcgcgcaccaccacgcccagctaattcttttattttctgtagagatgggttttcgccatgttgcccaggctggtctcaaacttctggactcaagggatccactggcctaagcctctcaaagtgttgagattacaggtgtgagccatgagccgggccagaaccttggttttacctctggaaatgggccatggccagcccggacttatctgggtaggtgcccttaaaactttggcctgtgtggggaggggtgggcacccaccctgctgaaagccagcaggaagtccagctgggatgagttgggcaccgagtggcgcagcttccagtagaccaggtgctcccaggcgaagaccagcagggccagccccatggccaccagcagcatgtagaagacgcctgccatgttgtcgatgtccagcttgctgctcatcacctcgttcttctcattctggcagatccctgagagccacactgtctccagtttctgtgtctctcctggagttggggggtgtacacatctggctcaggaaacccccctataagcaaccccctcacaaagctcaccacaaacctggagtaagaagggatctggggcagggtgccacccacttcttcctcaagcagaccacatggggatccagcctggctggagcaggatggtggggcggggagtggagggtcagtgagcaaggaaataggaaagcagggtggaggctggagtgggcaatgctggcctttgggtcctccccctgtgcacccccagtaaaggcttgtgattgggtaaatgttagcattcattcattcactcctcttcatatacttattaaccatctacatgccactcacggagctgggcacacagagacaaaaggcctaggctcctaagagacacacattgtgattgctcttattattattattgttattattattatattgagacagtcgtgctctgtcacccaggctggggtgcagtggtgtgatcatggctcactgcagcctggatctcctaggttcaagcgatccttccacctcagccccctgagtagctgggactacaggcacaccaccacacctggctaatttttgtatcttttgtagagatagggtatccccatgttgtccaagctgatcccgatctcctagacttaagcaatcctcacaccttggcctcccaaagtgctgggattacaggtatgagccacctcacctggccgctctcattattatatggtttgagaaatcagatttttttttttttttttttttgagacagggtctcactctgtcacccaggctggagtgcagtggcacaatcatggctcactgcagcctcaaactcctggactcaagggatcctcctgcctcagcctcccaagtagctgggattataggtgtgtgccaccatgcctggctaattttttaaaaactttatttatagagacaggatcttgctgtgttgcccaggctggtctcaaactcttgacttcaagtgatcctcccacctcagcctcccaaagtgctggggttatagccatgagccaccacacccagtctagaccatgtcttatctaacaagaatggaactcctccaaacacaaagctctctctgggtttgggggcaggctgggctggaccactcacacatgtgggactgggcagatccgtaatctcaagatggccatggagatactatactgagcaaaggaggtgctcatctgggagagatcttgggaggggtcttagggaagaagaaaggagttcagccactccacccatccccacccccaccatgaggcctgagccccttcctgtcttcctgcccttcagggactctctagcccagttcctgctcccgccctgcacacctatcccttcctcaagtctctctccagttgctcctagtacctgcccacctcagctgccccaacctctcaccccccagagacctctccctgctcacaggccttgggaacttgagtggtggtggaaatgctgacaaccttgggctccacagcccaccctgggcatcccagcaatggcagtacccaccgtcccccaggaactgcaagagcgccaggtctatggcccgcttccagtgggagtccttctgcatggcgatgccgtagccagtggtagcaaagaccttgccagacccaatggtgaccagcttgcagccctcgtccttgcctgccatgtagttgaggacagcagcatcatagatgaaggcatccagcttcctggggacaggctgagcctcagagctagggaccatatgggaggggaggggacaccgaaactggggcgtgacaggggtctaaaccacatgagcctgctgggcacccccgggagggaccaatgggcagagacttgtctggttctcttgggtcctggatggggtgaggacccctcccaccctcctctgcagagtggccaggggactgtctgttcccagaagacacaccaccctttctgcccaccctctccgtgctcctaagactcagagaaggtcccaaccaccacctcaggctgaggctgaactttgattggcaccacagctgtgttctgagacacatggtggccttccatttttgcctcaagctccactctgccccaagacctcttccctccaccccacaggagtcctgcaggacagcccagtcccactgtccccacattgagagctaaggctggtcactggggagacacacggatgaagacagcgggtgcagggctggggacccaccccatcttgaggctggtgagcgcgtcctccaccgagcgctggttgaacttgaccatgtgggtgtgcatgtcacggtagttactgcggatgttccgctccgtgctgccgttgggcaccgtgccgaagcggaaaggtgggtactgatcttgaggccgctgaaactgcaggcggagggcagcagccagtcacaacccttcctccagccttccaggcaccaaagccccaaacccaccccagagcccagccccagtgtggacttgcatagtcagagcagaaggtcttaaaggctgtccaggccactcctgtgttttccaaatggagactctgaggcccaagacagggagagacttacccaaggcctctcagccggtggccctgagccatctcttgccccagcccccaaccccttctcagcaggccctgaagcttcttcctgccccagcctccaggtcaaattccccagactcgactgtccagggcctgcccactcacggcctgtccccaccctcagtgcccccccccacccccagcagctatggccccacaaccttcttgtcactgaggcccgacacagtgtcgatgtattgctcttggatcatgaaggcggccaggttggccgtgtagctggcgaggaagatgacagcaaagaaggcccagaccagaaccatgatcttgctggtggtgccccgcgggttctcgatgggcactgagttgttgaagaccagcgcccacagcagccacacggacttgccgatagtgaaagctgggcccccggactctgggggcaagaggcggggggatgctggagctcctcctgcccaccatgaaagggctcagggctcagcccacccgactgcacagctccggtctcagcctggccttgggggggacgcgtcctggccattccctcgccaggtgaagtgagctcacgtgtgtgtttctgtgtgtgtgtgtcatctgactggcccccagcatgtgccatccaaaagcaagggacctcccaaaggtattctctgaaggacccgttgcccctgagcccagccctcagggtgcccaggcccacccctcctgccgggcccaggcaaggcttactcttgcctctggtgaggttctggttgtagctgacagggctgaagtactcgaacatgaagacggtgatggccaccacagtgaggcacatgacaaacatcatcacccacactgcagggctatatggctctggggacagagggaggcagctcagaggcctcggcatgttccctgccccaggcccagaagcactgggtggagacaggtaggtccacgtgatcaaagtaggggcccaccagctctgcggacccagccaagggggcctctgactcagagcagcagagccccaggagaggcccccaaaagaggtcaggctctccagcatccttggtctccccccgccccccacttccctgggacaggtacaagtcacccaccccaagaaacgttcctttgacttcacaacccctgcctggccccacgtggatgatctggtggttctgcctggaatcagagcccctgaggccaagtcttactcctcatcctaccaacatggaaacccacacccagggaactggagacatccaccccaggcctcagacaagactgtttctgtctcctagagtaagaaatcactactgctggctgggcttggtggctctcgcctgtaatcccagcactttgggaggacgagacgggcggatcgttcgagaccagcctggccaacatggcgaaaccctgtctctactaaaaatacaaaaattagccaggcatggtgacacatgcctgtagtcccagctactcaggagcctgaggcaagagaatcagttgaacccaggaggcggcagttgcagtgagctgagagcgcaccactgcactccagcctggatgacagagcaagactcattctcaaaaaaaaaggaaagaaaagaaatcactactattggccaggtgcagtagctcacacctgtaatcccagcattttgggcggctgaggcaggtggactgcttgagtccaggagtttggagaccagcctgggcaacatagtgaaaacctgtctctacacaaaatacaaaaattagccaggtgtggcggcatgcacctgtggtcccagctactcaagaggctgaggtgggaggatcacttgagcccaggagtttccaggctgtagtgagccaagatggcaccactgcagtccagcctgggtgacagaggaacaccctgtctcaaaaaaaaaaaggaaggaaagaagaaaggaagagtgggaaggagagagggagggagggagggaaatcaatcctgccatgagcacttgctatgctatgaagtggttttttttttcctctcttccgtggctgaggagcctgctcagagaggttctgtgacttgcccgaggccacacagcaggacagggcagagccggggtttccactcctgtctggccagcctcagctcttcccctgcccctcgcctgtcttcacagctctctgccacctcacacttcatgtcccacgtggcctctgacagggaactttgggaaggcaaagactacgctgtagccccagcacccagcatgggacctggctgcccaaccaatgccggactcctcacccaggaagcaacacacctcttcgcacactacactcgctcctcaactccccacgggcctcccccactcgttccacagtcctgggccatggcccatcctgaggcgagcctgcctgctggattttcctgccactcacagtggcaccacgacccatcccacacccccaaccccaccctcacctggcagccatacctagaaccgaacactgacttcacttctcctgtctcctttccactcacctccagccaacctccaagacccaaggctgctgtgcttggcctgtgagagcccacccaactccccatccccacccaagctgtacacaccctcctcgtgggcccctctgcccccggagccgtctctgcccaccctgggcctcacccaagaaggccgagggggagacggtgccattgctgcgagccaccatcacactgatgcccgtctccacaaagggtacagagaagtctacgatctcggagcgttcctcattgatggtgagggagccgatggccatgtctgcccgcttgtagtacacctgggggccggacgccacggaggtttgaaaaaggggctcccgtggggtggacacgctgcacaggcacctccagacaccccttctagcacccaccagctgagtcaatcattccctctggggccctcagagctcagctttcagtactgaccaccccaggagtcatcattggtgacagcccatgcccccctctagagggcatctgagagccacatggggcctgggcagcaggtgggcaggcagggcaggtgaggagggagtggggtggggcctacctccccaatcatgccgttccatacgccgcgcacccgcttgccatgcttgccgttggtcaccaggtacaggtcgtaggagaatttgaccactctggccagcttcttgaggatgtcgatgcagaatcccttacagcagagcttggtgtagggggccacgtccccgctgctgcagccatgccgccatgagaccaccgggagtcagagtatgtcgtggcccagccccgccccagccactcctccagcctggcacgtggacccctgccccacacccaagcatgggacatacacgacacctgaccatcacacggcagcacccagctcacactagcctcccagggccctccacagacctgaaggtgtggttgctctgcctgcggcagggcacggtgttggggacacagcctcctgtgccagggtcagggctctccacgatgacaaagggccgctcttccagcgtggccaccgtcaggtgccgactgtccaccacaggctgcagagaggcactgtagcgaggccacacggggtacttcatgtataggacgccatgctcccagcgccccacctgtggagggtgacagcctcagcctggggcctccagccctacagcccccaccctctaggtggagcctgccagggccaagaatctccctctctcacctagggatgctggggcaggtcagagtagggctgctcccaacagcctcccccagcctcgggtccctgtgttcatacagctccacactgacccacagcatcttcctaaagcccagacctgaccctgtctcactcactgtactggtcccccctgactttgacagaacgtccttagctgagcactcaaggcccttcatgctccaaacccttctgcccctctgtctcttccaggctagcacctcttcctggtgggctcctactcaaacctccacagcccagctcaaatatcccatcttctgggacctctttcccagtttcctcctttgaaggcagaactaattcctgttcctcatctccaatcccacaatcttttgcacacgtctactcaagcacttgtccctgcatattgtttacaagcctgtctggccagcatggtcatgggttactcctgcaggggcaggaccaggagataggagcgcttgaaatgttctatagtagagggaagccggggtgttatgggagcccagagcagggcacctcacccaccccggggcacctggaggcttcccagtggaggagatgtttgtttcagctgagacctggaagatgaggggttggataagggacagagggactctctgctcagctgtgggcacaagaggaggcggggacaaaataagaggacactgagggcccctgggctcacccccttctcaccatctcccagaggcggtgccggttgagggcgatcaccaccatggtgggctggaccaggtacccaccagggctgaaggagaagtctcggccctcccaggtgacattcagtaggtgcctgccagaggggagagatgcctgcagccctgccaaggaccaggcaccccctgcctctgcctcaccgccgccaccgacagcaggtggcattgattgtgtttattgttcaaagtgcttccctatattggccccacgatccttgccacaccctgacacctgctgtttgttcagatgaggacactaaggcccagacaggtggggtaatgtggccccaggcacgcagctagtgggaggtgtggctggccagcccaaactcactgccagccagctcccccgaagcgctccccacctccctacccctatgccccgggcaggtgcccacctgtagaaggcctcccgggcagggctgacgggcccagggtgaacacggcagtccccggccggggctggcagggttccatgctggcgccagtagctgtgggcgcccagggccagaatggccacgccgtcgcgcaccttctggcgcaggctgaggcgccagctctcggtgacgacgctgatgaggcccacggggaaggtggcggggggcgcatcggtgctgcccagcgccaggttgggcaccagccacacgtggccgggccccaccagaccggcctgcgccgcctcggcgaagagcacctcggcctcctcgcgcgagcagtaggccacaaacacgggcgcgtcgagctggcgcagcaggcgctgcgtgcgcgcgcgcggccctcccgggcccagctccagcgtgaccacgtccagcagccgccaactcacgtggctggcgtcggcgacggcgcgcacgccctccaggaagagcgcgtggcccgggtgcaggctggtgatgacggcgaaggcgctccagtcgtactcttccagcaccttgaacagcacctgcagctgctgctccagggacacgcccagctgcaggaaggcggagcccggctcctgggggcgggcggggcctgagcggggcgggagggccgagcccctcctcccgccccttccccgacctcggcccctccatcagctcccaggcgcccttgcgccggcggatgctccgcattccgggagccctctggcctgcgcctccctcccgccccaatgtggttccccgctgcctagtagcatggtcatgcccggcccccagcccaccacgctggcccgcagacccgcagcatcagcaccactggggagtttgtcagaaatgcagattctcaggtcgcaccccacaccgactggatcggagtcgctgggtatgccgcctggcatctgtattctcacaagctcttcagccgatccttgagcccgctagactgagaagcgctgccccagaccaactgaatctgaattccagaggtgcaaagccaggcgtctgtatttcctaagagcacgatgagggttgagagccaatgtcctgagatcttatgccggggccccaagaggacggggaaacgccaccctggttgaagccctgagggtgggaaagctcctcctctccacccctctgccaccacaaaaacccaaggcactgccggctggcaccggggccagcgcagtcccctcgtaactggtctcactgctgccactgtcccaatcttttaaaaaagcaaataagggaaaattcagaggccaagcaacgcagtttcttcaataaacaaattgcaaggaaaaaagagagacagacagaggaggggcccagaggttgagagaaactcagaagccacaccaaccaaccggcacgtgtggacccgatttggctcttaattcgagcaaacaggctgcaaaataaacacttatgacagttatgaaacaatggggaaatttgaacactgcctggatatttgaaggagtttttattattttttagacgtgataatgtatggtggttttacgttcttaagcccttatctgccagggatacatactgaaatatttatggatggaataagaggatgcctgggctttgattcaaattaacacagaagaaggggaagggggtgctggtgaggctggggtggatggccagggcgaatgggggatatatgagtcttccttatactttttaatgtatactcaaaattcttcatataaaaattaatgaaacaaaggcgaatcagatcagtctcttccctcaactctcctccgctcttccctgagtggctagatcaacaggggcagggccaggaagctcacagggctaaggcaggcacagaccacggccactgtcacagccggcttgcgctgccctgtctgctcacttgcttagggaaaagcccaaatgtcttcccaggtggccaggcccccgcctccttctccaggcttttccctctattcctccaaagctctgagctccttcctcgccttggggccttcatcccacctgcttctctgcctgggcctctccccctccccaccggctcgcccttaggccctcagcctagacatcatttctccagagactttccctggccaacaccctatgcatgagccatgagtgagctccctcacagcatcctgtgtctttccttcagaacgcttgtcctagttgtaactgctgatgaatgtgtgtttggaacgttctcccctgagccctgcaagggcagggccgtttctgcctcccccagggctcccagggttccctggtgctcaccctacaggtcaactaccactgcccagagggcatggcaccacctccatgcccggctggccctctgggtcttcaccctgacctaggaagctgagggaagcagagaggaggagggctggggcctgagccccacagccagagggtgggcctgcaccctgcccacccctcatccagacacaatgtgaggtcagcccagaatatctctcctctagaacatgggatgtcattcccataaccatctccccatcacccacatcatgccctcagcccccacctccctgcccatcccgtctaatcccagcttcccagaaccaaagcacccccgaccccagcctggttccaggcctgaggcacgaggggacatgagtttggacatgcaccttgggggtgaggaccacagcagagcctccgctgatgctgaggatgggcacatgggtctgggaggagatgaagtcaaggatctgggccaccgcctcggtgtccacgttgtcctcaaagacaatgccgtggacgtgggcagcacccaggaggccgcagatctgggtgaggaggctgctggggttggtggtgttgaccccaactgtgagcggctggatctccaggggtaggtccaggaagctctggggggtgaggcgggcacggaactgggcctggggcggccctgagctgctaaacaccacggccaccgtcatgccctgctcgccctgccccggacccagccctgcccaggcaccgaagagcgaggtgagcaacagggccggccccagggccccacccatgtccaccggagggtcctgcggagagaccagaacaagcacagggagagagacagaggtttggagagaggcagatggacagacaggagggacagagggacacacatacggaagatgaaagagaagaggggaaaacctccctccccgaagagaggcggagagagagggagacagacagacacggacaaagagaaagagacagaggttagttgagcatcccaagggcatcccagaagagcaagggctggggaagaacaggagccatgaccgggacccagccctccagtctactgatgccttccaaaactcagccagtgggttctgccctaggaagtcatactgaaaatgctagtctggggttcaagtgcatggatttgagtcagacagatctgagttcgtgtcccagttctgccactaactggctgtgtgatcttagggaagtcacttagcctctctgagccatgttttcttgcctgaaataatcacagcagtgtgaggacttagatgagctaacaggctatttgctgggattagtgacctcatcccgcaggtgacaggcccccagccaggtgaaggaagacagctcttgcatcacccccaacccccacccccaccggccagtcctcctcatagtctaaaccggatcttccatctgtctctcaccagggcctgtgctactggtcagtgtgccctgcttgccatggggccagccccaagggccctcctctgcatggttctgcctggcacagagccccctcctcctgggcactggacgtcactacagcccttccttctgtggcctcagctagtagcagctcttccgcagcagggtgcaacagcactgacttgttcagagctcaggggtaccggaaaacccaagctggtgagctggggtttggtcttgttacacatgagctggtgagctggcctctcgggccatcactggcgtgcaggatcttttgaacccaacccaggggcctgacacgtatccttgctaaatgtcattattttggattgggaccaagagccacagcagtgagggtaacacaaagcctgagtggagtggtgcccacggatgtcactctccctcccagctggccatcggccatggcactgccatctctcccatcttcatcacatccccagcaaaacttctgagcagggaagagctaaagggtggacagggtgagcctgccactccagccctcccgcctcccccaggatctgcacatctctgctacagaaatgctcacgaaaatcaagcagttgccagaaaccacgcctccgaaagacagatgcccttcagggatggggcccgagacaactgctgggcaggctccagctttctcacagggccttccttttgcctgccaccaaatttctctctctctctttttttttttttttgagacagagtcttgctctgtcacccagactggagtgcagtggtgcgatctcggctcactgcaagctccacctcccgggttcatgccatcctcctgcctcggcctcccaagtagctgggactacaggcgcccaccacc[177 bp omitted]tgtcttacagacatatgggccttcttgtatctctagttctctctaaggaatccagagagcggggaagtgcaagaggctaccaggaacattcaggaaagttcctcttctccccagggtggcactgaaaggatccctccagggaacccactaaaccaactttagtgtagaaacatcaattggcccgtgtgtgctgagccccttccctgcagcaggcgctggatggtggaatgtccctatgggtgagacatggtccctgccctccaggaacttagagtcaaatctgcagaatgagcatgctgctgttagcacctccaacctccttttttctaaatatatttctctttccaaccttctctccctacttccctcaaactccccagcctccccgtcaagatcttctcttagctaagcatctagagctcattcacaggaaggtatgagggactgatcatagctgaaagggttctcattcccaagagagatgtagtttaaccacaatcagagccttaagctaaagtgccaggtggtagaatttcaggccaagaagacaagagttttggcaaggaagggaatattgctctcatggtggcgcccttgaaatcttcccatgtgtacggttccctagtacagtgacacagaagtgacagaagtgacagaactgacagcccagagacatgtttgagtctggcaagggatcgatcctagccatgccatgccatgcctcagctgccaccaccaatcagggatgtcagatctcaaccacaaaggacactgacatgcttgtcgctccccttgcacggcctctgtctgctcacctctgcccacacctccaggtcctagaggttccttgccctctggggagccccaaacctcctactacccctgcctcccagtaatgagctctagatctgtgctgcccagtataggagccgccagtcatacacgactattgggtaccagaaacatctctcacccaaacggagtttgctatcagtgtaaaatttcatgccacactgcacattgaagacaacagggaaaaagaatgtaaaaaatctcgtaaacacttgtatcttgattacatgttgaaataataacatttggggtatgtttagtcaaagaaaatatactattaaaattaacgtcacctgtttctatttgttttaatgtggttactagaaaattttaaattgtacttgtggctcccattttatttctttggacagtgtgaccctggatgaagggcccaggctctccctcaactgcaaaggggcagaataagcagtctgccattagcatctccaacctcctttttctaaatgtatttctctttccaactccctactcccctcaagcttccaccctccccagtcaagaccttttcttagccaaggacctagagctcattcacatgaaggaataagggtctggtaatagctgaaaatgttctcattcccactctctccaataggaagacatcctcatgggctggggacaccagagactctctccaaagggaaggtgtcctgctgggttgggggttgggggtcggggggtgggggagttgaggcaggttgtacctctaatcaaggggcctaaaatgggggagggatcccagaatacctccagagccaggggccaaaactaggtaagtccctgggctccaaatagcaaggggcagactcaaggagcttccgaattctgtctcatcaccccgtctaacccagccaccctacagaggtaggagggacaaactccactttcccccgccacaatctcctcccttgcctccccctccccacctcccacctacccacccccgccagccccactgcactgctgaagccttcctccagccactgctccctcctcacacaggacagctacaccctggtgcccacaaatgaagtccagacagcttagtcccatagacagagccctctgcaccctgaccgcaaccaaccgtcctcccatccctggaacccacagctctgccagtctgctggccaaacagccccattctgccctcatctccaggcctcgttccagcatcccccaggctggaatgtcctcatcccaacagaagtctactctccttcagggcccagctgaaatccctctcccacaggcacctgccttgatgcctcaggctctaggcgcagggactgcggccaggctggggcacctgcccttcttccccctgccctggcttcccctcctgggtggggagctctgtgtagtggtcccctccacccctccattctgccctgcggcaggtgtgtgtgcactcattaacaccctgccccacactggactgcgggctccttgagggcagacacattgtctcagagacctctgcccacccacccactcagggtctcaccccttccacaaacagcccttaaactaatgtttgacaaacacagagatccccaaagagccccagagaggatggcagtggtcagtcctgcaggacacagcagcatctagaagggtctgagcaccttcccaggctgggggccttctccttcccgggtcctcacagctcagccagaccccctggcacggacctgcacacacatgcacactcccgcactcatacccgctcacatctgagataccgatggctctccctctcccaggctaggaaactctgtcgcaggagtcctccccacccaccagcagaacccccggaccccctgcccttccggtgagccgcccctcctttgccgtcgggtttccctccctcccttttgcccagccaaaacccgaacccaggcgccaggggagaggaccgccgttctagcttgccccactgctgggggcacggagttcttgctcctccaaggctacggcccccgtctccgcggaccccgcccggactccccctggccaccgggacgccccgccccctcccctccgcagcaatctcttacactcgggctgtgaagttcggggtatttttaggccggcgataaataattcatagggaacgtggcatcaggctccccccgcgggaggagggggcgcgagcagcgagagccaccgtcacccgcggctcaaggacactcgcgatgcggcggcggcggcggcggcggcggctccgggcggggacccgcgccacgcctcctggcggccaagctgagcaccacgcacccggcgccccccgccccacgctgccccccgccggcgtccgcggctccggggcccccacccccactcccccaagctgggtcgtgaccccgagtcccgcagtggggggaccaagccagcctggcaggcggccccagtaccatcccaggcccgcccgggggccctgggcgaacccaggtgtcccggacctgcctacctgcccctggcacgctcttattcttcgggagtttagaaacaggctcaaagtcactagcaccgccaagacctggacgggctctgaaatacagccagcggaatggtaccctccccaaataagtgtctttcctcgattttcctgtggcccggggtcagggactgaactaagataacgccaccatccgagggctgggggaccgagccagaagtccccttggacgaccagggctgggaaaccgagtggacgaatggggtgggcatcagggcctggcgggaattcccgtcttgctcacccagcagctccttgcagggtcgcgggacgcacctgggggttcaggttgccgggtgcctttgctccgcgtgtccccgccctgcccgcgtaggcaggaaacaggagactcggggcttcccctccccgccgtcggggatcctgggcgaagcccccagagaccggcgcaggcggctggtgcgcagccagggcccagcgccaggtcttgctcgcccagtgccctctctgcctacccttccctttgcgctctggaagcccgggagccgggcacgggccagcatctgcaagatgccactactctggaagcccactccgattctcccaggtcgcaggaaggagagagctaggctggggcaaaggagatggggcagagctggaaggggaagaagcgggactcgcggcgggggaaggggtctgggcgccgaggcgagtgcgcagcaggtgcccagcagacctagggaaactggggcactgggctggggagccgcacagccccctttcaccttctcgactcctttccaacccctcgctctggtggatcccagccccggcccccactcccggccctgttccccgctctccgccccggcggcttccagcagcaacagtttgggtccgcggcagcccagactcccctggtcccgcggtgctgccgcgccaagcgaaggaggaggagggctcggcgaccctggggacgaacgtcttggacgcttcgcccgcgtccttctctcgcgtccgccgcgcgcctgtctgctcggcctcttcttcgccttctctccggccgcccgggtcaaaacccaaggccaggttcttgagggtccgggtcctccagccgccccctccttgagccccgagagtcctgcgtgggtccaaccccccgggtgtcccgcctctgtctccgccgtccttgctcgcgcgccgcgggaacccagccccaagttggcggcgaagttggtgcccctcgcccgccgctcgccacttaccgaggggaaggggcgctgcgcccgcgacgagagcccgcgccggccgcctccctcgcggtgtctgtcccagagcctcggccccggagggctggcgcgctcagtctcagctccgcgggcgccggagcccgggcgcggcggggcgggggcgggggcgggtggcgcggcctggtccgctggccccgacccgcccctgcgccccgcgaccctcccgaagctcgcacggcgcccggctccgtcccgggctgggctgcgcaccgcgcctcctgctcccagagctcgcagccgactgtgcgggagctctcaccgccgcccgcgagggcccgccccgccggggcccgccacctccgccccggcccggcccggcccgctgcccctcgaggcccctcccgccgcattcccgggcccctctcccctctccggaaccgcgtccccagacctgacactcggggcaagtgcgcctcggaggacacaccagcctgcccggagcctgggtttgagcccgcagctcacgagtgtgtgaccttgggccaatttcgaggacccctcaggttatacagcgaggcagcatcttgagggctgccataaaagggagtgaccactctctggacactgcaaagccctagggagactgaggcactatttttaaaggccagtgtgtctgactggaaacggaagcaggaaggctttgagagccaaagaatgggccccaggctagactcgcctggggcacccagaggtacaggggacaagctgcttctcagtcccccgctcccatttcttttctgttttgattgtactgagggctccccagggaggggtggtcccggtcccggtcccgggcagccctagtgtggacagaagacaggcaacccgcagccacagcagggccgagcggagaaaggaagggtggctatgccaggcctggctgccgagccccatcaagcccccaatgaggcccctgagcagggagccgtctctgcagcgccacctggtgatggtaggggagctacggccagaaggtgacccccgaccccaacccttccaaaaaaagtcccccatcaaccatggctcttggttgcagctgttttatttccagcatgttcccaacctggtgaccctccacagtccagcagtagagagatgggtaaggggttagatcggcccacacctccacctgtccctaaggttacctcagttgctgaaagctaaaaccttgcgcgcaagggcgaccttccccaggagggaggagagacgctggaagagcagccaagcctccaagccagggccggccgggatcagcagaggtgcaaagtcccactcagacggacccagcccttcccctcccaacactcatcccttccctgctgggggccggggctggggctgggctcagtggcccaggaggcgcagcatctcctgaggatccaccagcttctccctgggcttccccgtgccctggccccgggccacctcctcggcatccagcttctcccagtctgagaaagagactggccggacccctgaagcagaggggagattgtcaacacctcctccttcacccctcccagaacagccccctcccaaagagtgaggcccagagaaggaccacccaccccacctcccaggacctcagcatcggggcccagacctcggctgctgagcagggcctggatggctgcgtagccaggcctggggccagaggggagcaacccagccttcaggtcctgcagcagcatctggccggtgaggaagctgtcagtcatggttgtggctatgacacctgtaggtcctctcttcacccagccgctgcagtagaggcctgagagggggtaacaaaaggggaagggagggaggtggctggataccaccctggccatcctgtgcccacaatctacacccacgtgcacgcacacagacaccccacgcctcttggcagactgtcggctgagcctgctgtggccgctggtccactgccctggattcttctctccctgtttttaccaggccgacccccttacacctcagtttccctgtagatgaggggatccctaagcttaggagctgaggcttgctcccctgcagtttcagtaggcccttggtaaatgtttaccaagtgaattaatcactagataggtatgtgggcacttagtaaaactggaagctccctgaggacacaggctgccttattaatctccaatcccagcactaagcacagggcctaacccagaaaagacctcagtaaacgtttgttgaatgacttaatgacccgacgtatgtcacatatgtcctagccagactggaacttctctcagggccaagaggagggcggcactgggtcctagagagggcctgccctgcagaagcttctcagtacatgttgctagatgaatgaacgcatggccccaggagataccagcttctcggcctctcaccataattcagcacccagcctcctcacaccctctcacctggcacatccataacccggccctccacattggggatgaccccaagcttggagtcaaagggcacgcttgggtcgacagggcggctcttatacccaatgctgctgagcaccagcccacaagggaggtcttccatgtctcccgtgggcactgcacgggtggcctcatcgacaccctgttggggagagtgtgggcaacaccaggcgggtggcagaggcctgggaagggggtgtctttgggaaacatgagactcacctccagtctagtgactgctaggcggacacctgctgcccgccgcccatctggtgagggcagcacctgctgggggcttcggaaaaagcggaggccccaggcacgggaggccgatgcctggcgggcagcttccgccggccctggcttctctgtggccgttcgaagcagcagttccgtcagccgcttcctcgggcgggggacctctgtcagcaacgtagaatgtctccaggctgtccctgggccccggccctctccctgcatgcccttccccaatccctctctgacctaggccaccctctccctagtagttggggggccaggccagggcccctcacccttgatcttgtcctggagacccaagaaatccacaggatccaaaatgggccgggctcccggtaactgaatcatctcccgaagctccttgaaggtgggagcagggaatgggggaggaggtcaggcccagaacacagtccacctgagcccaccccagggtccagcccaggcaggagagaccaccacccgcctcctccccaaaggcacagggcccccggggccctgactgctccccttcttccatcccaggcagcagctactcccaggggctctgccccaccccaaccccttaaggagaggccccctccacctggaaccctggctcctcccactctggccccagcaccttaatggtgaaggccacttgcaggggtccacgccggcccactagccacactgtcttcactcgactctgcctcagtacacccagggctgccttcgtgatgtccgttctctggcacaaaaggagggccttggagtcatcagacactgaccgaggaaaggggactctccatttggtcatgtccccaccgtgggcctggagaaggctggcggctcaaaattgcgccactgctcccccctggtggccagatggagcattgctgccaactctgcaaatggctccaactaatagcacaccaggcccacactttcattcaacaagtatgtagtgggcctctaccatgtgctcacccccatgcaaagagcttggaggggcggggtggtcaatggtgaggaaaagagacaaggagcaggccctctcagagcttgtgatctgctggggagagaaatactcatcaaatactcatcaatgtgtgtaaaattgctgtggcgatgatatgcggtgaaacagaagtagacaggtctatgggaggaggcacgatgggggagtggaccaattcagggaagtcctggaggaagggacaaccgagccaagatctcaaagatgaactttaactgttaactggtgggaggtgagtggggatgatccaagcaggggatgtggcttactgaagagtaagagaaaaacgccacttagctggagtgcagaaagtgaagggaaaatggtagaagaggaagctcatggcactgcccttcagagagcctctgcctgggcaccacggggaaacagaggcactgagcccagcttggagaggtaaggcctgaaccctgcagacaagggcactctctcctcagggtgaccccacctccaaccccgccagccctgacctaccactcacctccaggtgctcaggtggggtcagtaggatgcgggccacgtccagagccacgttcccctgccccagaatcacggctgtgtcacagctcaggtctggctccagctggaggggaaaggtcttgatagggtcccccagcctcgctccactcagttcatctcagtctgcaggtgcctcatgcctggtccccactgtgccctggggcttccccacaccgggaaagtccacaactctggtccctcctcccccacctggacccagctctcccccgaggccctccacagctggcctcccgcctcagtcagcacaatgtcacagctcgccactggatggcagctccctcttcccccaggtctggcatccaagggctgaggggcggggaggaagaggcagcgggcgtgctccccatactcacctcctggttctcaggaagcccgttgtaccagcccacgaaggcccgggcggagcacacacctggcagctcctcaccaggaatttccagggcccgatggtcctctgccccgtagctctgatgaaagatggcaggcccgagacccacagccttcagcaccagcactgataggccgggcagccccccaggctcccagcggcctccttccagcttctcagcagcttgcatcctggcctcacccctgctgccttccaccccgagccaccggcctccttctgcagcccctgcctccccaagccagggcctagctgcactcaccagcaccacagcgtggtaggcctcctgcagctccggcaccgtcacgtccctgcccacctccacgttgccccagaaggcacagcggccagaatgggccgtctgggtaaatgtgttgatgacattctgccaggtcccccgggaatgggaggggttagagggtaaggcagctccagggaccaagtctgcaccaccctcaccactctgtgtccccaggagggaagctgggtggcatgggcacagacggcatgaagtcctgtcatccagccagggagcctccctgccctcctcatcttgaccaaagtctccaaaccccagcctccaggcccagagacacccaccttcacctcggggtgatcaggcgccacaccaaagcgcaccaggccaaagggcacaggctgtttctcgtagatgtccacgtgggcctgggggtgctgctggggaacagggtggcagctggtggggccgagagagagaggctgggacgcccccaggtcctccccttccccagacagagcaggagagttcaggaccctgggctgagaacacaaggcttccaccctctgcaaggaaaaagagcactcactccttgggtggctcgcgcctgtcagcccagcactttgggaggctgaggcaggtggataacctgaggtcaggagttcgagaccagcctgaccaacatggtgaaaccctgtctctactaaaaatacaaagattagctgagcgtggtggtaggcacctgcaatcccagctacttgggaggctgaggcaggagaaccgcttgaacccaggaggcagaggt[137 bp omitted]caaggccgtggcttcccccgactggaattatatcagggcggcttctttatcttctcaggtcaagcacaacccacagccctggcctccaacccttcgacacttgggaccctcaggtcccagccagtctgaggacctgagggccaccctctgaattcacaggtgccttagctctagtgcccaggaccatgctctggggaaaggggagcagcaggacagggagggggcacggctgggaattcacgggaaagagaggtggaaatgggcctgctcccactcttagaaagacagtctcaggcactggttctgcatgaccgccttcccagggcaccttgagaggccgtgtgaaaggcacagggtcgggggtccagcaggcaagtctggtatggctctgccaccaaccagccacatgatcccagcaagtcccagggcctccccaagtctcagtctccccctctgcacactaggatggatgacagctctctctcatggctgctggaaagcaccaggaggtcaggatggtgagactctgggccacaggccggttagcagtaaagcagtcaggggtcccacagctgacacgcccagccccccatcctatcttaggtccccgctatgacacctccagcttcactgggactcaaggcaaagaagcccctgcccatcagtctccctacccccaacaaaggctcccacccacctcttcgcctttgcccaaatccccccttcccctccactcccctgcctgcacccaagtccaccctcccccacctcctgcctctctccatcccaggccagccacagggggctacccaaaccacctccctcaagccccacgatgttgtacccacaaagcgctctgggcttggagtcaaacaggtagccttggatgccagtcccagctctagcactagctggctctgtgcactggggaaagtttcttctctgtccaaaagaagagccctgtggtgtcctgctcaaggttaaatgagtaatcaggcagcccggggtgcaacctactctgagtgttcaatcaagaagagagctatcattactattctgttgttgtatgtcactgccttgctcaaaaatcttcgctggggcccagtgccacagcataaagttcaaactgctcggcctagaggtcaacacctcacccaaccaacctctctgtccttatcttccattctttcctgcgacagatccttcactctgggtcacgatgtcctctccagggccacctccggaacgctaagtctgccggatgttcttaccccttatctctcgtggctgacctcatcttccaggtttcctccttccttccttccctccctcctgtccctctagctgctccccgctaacaaggacattctctgaggttcttccgattggcccccctccctcctccctgaggatttaacccactccctcctgcgaccccaaattcccctgaacttgctgatgactttctactctctctctcctgcccagacatctccccaagctccaaacctgagacccttggatgtcccaccccagacatctcaaatccatccagtttcaagccaagtccccttgccccaaaccgctccccacttctgctcctgttccctcgaccccatccactcagagcccaagctggaacctggggctcctccctgacccccgacctgatcccatcaatcccccatcctcccagtcctcttcctcactacaaccccagcagctccccactgctatctggccaccagccctgcctggacctacgctgcaggcagagggggcatcctgaaggaaaacagcagcccgaaaactctccagtgaagccaaccatctacagctgtgggcacaagaatccttcggggtgtttaacattgctgactcttgggcccagccacagagtttgattaggtccaagttaggcccaggaatgtgcattttgataagatgccccgggagactctgatcagggaagaggaggcagctgtggacacctcccagcgaaacctgcctccagagcctggtcaatggcttccaagccccccaggatctgggtcctacctacctctcagcctcggctctcacctcctcacgccttactgcacacaggcaccttccagaacttgccctttccccagagagccattctcttcctctttgttcacgcagttctctgtgcctgggacactcctgctattgtcccccaacctgacatctactgtccttcagactgcaattgggacatctctccctccagactgggcatggaccccctccccgcaccccagtctctgtgcttatagccgtcagagccctaaaataccttgtaaattatccacctgtcccctccacattcgaatgtcaggtcctcgagcacagggaccacgtctgtcctgttcacccccatgttcccagtaaagcctgcgcccagaacatgttacgtccagtaaatgattactgaatggattaacatggatggcctcacatggagctgccttcgctcagatcccagtgccatccctgctccacggtggaagcttggacaacctcacttggccctagcatccttacctgtgaagcaagaggcacgacacctgctttgcaggttgtcatgaggatgctacgagatgctgtgctcagtgcctgactcaagctaagggccactgtcccaaacgtgctgcatgtggtcctgtcttaggagcacagccagtagcttggagctccctgtgggcaaagatcagcccaaggatcagaacaaggattgtacctggcctgagcccctccccatcccattccacaaggaaagcatgtgcacgtgtctgccagctgaatacagtcgtgctaagaacactgcctggccgggcgcgggggctcacgcctgtaatcccaggactttgggaggccgaggtgggcagatcacttgaggtcaggagttcaaaaccagcctgatcaacatggtgaaaccctgtctcaaccaaaaatacaaaaattagctgcatgtggtggagtgcgcctgtaatcccagttactcaggaggctgaggcaggagaatcgcttgaacttgggagatggaggttgaagtgagctgagactgtgccactgcactccagcctgggcgacagagccagactccatctcaaaaaaaaaaaaaaaaaaaaaagaacactgcctggaaagcttactctcctcccttccaaaatgtcaggatcagctaaaaaaaaactgtcccttatacaaagcccttcagggcctctccagcccccatgtgctccctgatctccatcccagagcccaggctgtcctccctcccacatggcagcgtgcccaaggccttgcattccaggatgactccccacatgtgggaggccctcaccaaagcccttggtctgcttcaaggcagctcaaatgcactgtctctctttttttttttttttttttttttgagacagggtctcactctgtcgcccaggctggagtacagtgatttgatcttggctcagtgctacctccacctcctgggttcaagcgatcctcccgactcagcctcccaagtacctgggactacagacctgtgccaccacacgtggctgatttttctatttttagtagagatggggtttcaccacgttggccaggctggtctcaaactcctgacttcaagtgatccacctgccttggcctcccaaagtgctgggattacagacatgagccacctgggcttccggcccaggaaacagtttctgattgaccccacctgcctcggctcacgctgcccacattattgtaattagctctttcacccgtgttgcctgggaagcatgcacgggtcacttttcagcagagtgatcaactcatcccagtttcccaagaacttccagcttagcgctgaagccccttgtcctgggcagtccaggccagttggtcaccctacatttcaagcatctgtgtgtgtgtgtataattaagatattcatcctttctcttgtctctccacggacactccaagcctctccaaagctaggcaactgtctcacgtctcagttaacctgggtatcccctctctactctgtcccaaagtctgatgtggagtctcaagtagaacctgtagccttggcttggggcccttcctgccgaggcagacactgaaagccttgagatcctggccttcacaggggaagggggaggggcagagggcaggctgaaagaacagaatggcacggaggactggagctatgggtgaggagggcatggcaaggcaggtaaagttacagaaagcggaggaggtgggtagcctcgagatgtaggatgtttgggatagagtgaagatagacgagagaggagggaagatgaaggaggacaaagtcattttgcaggtctacataagccccctggagtgcttggccagggaggcaaagctgaccacctgccactgaccactcaccaccaatgtgcgttttacacccctgtcacactgaggacgggaggggaggggagcctcaggtgtaggtgaggaagcaagtgggaagtgtccaggccagatggctgggagccccttccccataaggcaaccaggagtgctcttaaaacccaaagcgggtgaggcttgcccttaggactggagcagcaggtgaatgatggactatgagtaagtggcttacctttagcaggtgttgggccgtgtagaagccagctgggccactgcccaccacacagatctggggggtcttctcctgtgtggagaaatggtggcagaagcctggggccaggcagaggagagggaaaaggtcaaaattaacttctctccccagtcccaaaccaacctgaatatccaacagaagctggaacttcccaagcttcaccctcacctgcatcctccttctcttgttcctcaaggctttggcatttgcagggtctcttacttcatctgaacccccaaaggctgtgggttcatccagagcccacatctcacccatgaacctactacaccactgccaatggcctgcccaacaacacttcattccctatccaatcggctagaatcccacatccttccaacggcctccatatcatcccaatctcgcccccgtgggtctccccacggtgtccctcctctaacccctctctctctccacaaaacgctatattgcccatatagacccgtcttattcctacagatccctgtttcgactcagactttcctctcgccccacagacctccgtatcatcctccattcaccccgtctcacacctgtagatctcaaagtctctccttttcacctttgttgacctccgtctctaaccctagaagcctcacatctcacgcacagatctccgcccacccccgtacaccaccgggatctcgccagcaggaagacaccccttcagtctcacccttctccagccctgccccagctctgctccgacccctactcagcgctcgcaggcctccccgcgctcccatccagccccaaaggcgccctgctcctactcggggtgctcccggcgggaggcagccgggtccgaggccacgccgaccagccccaccagcgccagcagcgcgaagccatggctgggagcagcaacctgcaagtggatctgttcctagctactgctccgcagggcaagcccgctcctgcccgggcccgcccacaagcgaggccccgccccaaaccccgccccctgcgctccgggaaagcggagccttgcggctccaccccgactcccgagagaatcccgcccccaaaagagagacccgcccttaactacgccccaccgtcgaagccccgcccctcggagcatccggggtatacgcgatttaatacatttctccccaggcctcaccttccctccaaatcccggaagcctagggttggaagagagcgaatccccatcgctgtttcagtccctccccaaggaaacagccactaagaaaggagcttattttacttagccgcgcccctctcgggaggctctcgtcgctcactgatgacgcagacgcccttgccatttgattgcgaatcctcccacgtgacttcgtcctagccaatcacgagtccggctccaagcgagccttcccgccgttgggaaataaccagagtgcggaagtctggggcgagggagctccttcccggagcccagcagcctccttcttcgaccccgggtgttgtgccgatgtaacccctcaaatccccgtctttgccgggccagggagaatattaaaccctggaaagctcgtcccacctcacctcctttcccattacataggtgaagaaaagcggggcggggcagtggcttacgtatggtactaaggacagagcgtccgacccccgtgcagccgagccgggaccagagttgaggtactcccctcgggttcagaatttaagggggctccaaaacactcagtaatcaagataaatataatactgcaacgttttaaaaggtcaaaagtaatgcaaaaagtctatgatcaaaatgtttttaaaaataaggacaggatccgtagtcacagctgacccaataagcctaacccctcttccttttccccatgggccctcttgtcaaatattacttccttggagaagccttttctctgacccgtcccctcccaagttccaaggagttaaaggcctctcattccacagcatctgaccttatcccatcatgacttactacactggttgtcgtttttaatgagattttaaattcaataataacatacagaaaagtgcacaaatcatgagtgtacaacttgacaatatatcacaaggtgtaaccatataaccaccacccagatcaagaaataaaacatggccagtatcccaggagtcctctgtgcccttactggtcacttcccctccctcccactggtaagtaaatgctgtctgctttctaataggtcactgtgttttatgcctgtcccactagaccaggagtaggcaaactatagcttgcaggccaaatactgtccaccagcatgttttggatgaccaacaagaatggcttttactgtttttgtttttttggaggttttggggtttttgtttttggttttgattttgttttttgagacagggtcctgctctgtcacccaggctggagtgcagtggtgctcactgcaacctctgcttcctggcttggctcaagcgagcctcaggcctcagcctccggagtagctgggaccacaggtgcctgccaccacgcctggttcatttttgcattttttgtggagatggggttttgccatgtcacccaggctggtctcgaactcctgaactcaaagcgatcctcccacctcggccttccaaagtgccaggattacaggagtgagccaccacacccagcttgtttttatatttttaatggtaaaaaacaacattttgtgacacgtaaaaattacatgaaattcagacttcagtttgaataaaactttattggaagacatccatgcttacttctttacatattgtctatggctatatttgtgctttgatggcacaattgagtagttgtaacagagatcatatggttcgcaaagccccagatatttactatctggtcctttacagagtttgaccacccctgcactacattataagctccatgaggatggggacccagtctcagctcttatacccccagggcttcacacactggctagcacataatggaagttcgtacaatcgaaaaagttctgtagggctccccatctagaggcagtatatctggtggtggaggatggattctagagtcagacaacattgggtctgaatccctcttcctccacttactagctatatgacattgagaaatttaatctctccaggactttttttcactgtctgtaacatttgggggaaatatgaatagtggcaatttgttgtagacattaaaatcagatgatgaggtcaagacaacttccataaatgctagataaacattagctattattatcatcatccatatgtattatgacctcccatatgtctctgtagattagaccttaagtctctgcagagatctggatatacttcattcactcctgtcacctccctcacctctcaggcctcagaaattcccagcccacatcctaagtgaaacagaaaatggagcctcaaagcaatcgagtgacttgttcccatgatacccatggtacagccagatctggcaccagtgccttcagctgctgcccataccccagtcaggtccagatcaataacaatgagtcattggttatgtatttggatggttttaatcatgagccaggactgtgcaactggggccttttctgccactgcgtttctcaaatggagaattagcagtttgattaattacacccctagatctcaaggccatttctaagctgctaatgcatttccaaggagcagcaataacatatagcaaagcagtgggctggggagccgccaagcctgcctcgtgccaagagggctgcctggatccaaaactccactctatcagtcaaccttctagcaagaaacagatggcacactcaaaaggcgtgattgaggacagtttaatgaaggagtttgtatacagaggtgtgagcagggtgaagggaatggagaagcaccccaggctagcaacagctggaaaccactaccaccgcaagcctggagggagctgtttcagaactagtgagagtctgtagctatggaaaagggtgtctaaaggaactgcggtctttggtaaaggaaggtgtggtggagatgaatggagagtgcacataaaagaaccagtggcctctgtgcagctgcctaaggccacaccacagaggggctctccaacggaacaaggctcagggaatgcctgtgcctgtagccagacccctctgcccatcccccaggctcccatttgccggcagtttgtctccctatcagcagggtcaggaggcctttcactctatccaaggccttcactgaaaaacaaggcaattacacgctcagagaatgacttgcatgttctcaactgggtcaactcagcaatgtctggagacatttttgattgtcacaacttgagctcccagcatctagtaggtagaagccagtgacgctgctaaacatccaacaatgcacaggacagcccccaacaacacagaattggccagataaaatgtcagtagtgactgggcatggtggctcacacctgtaatcctagcactttgggaggccaaggtgggtggattgcctgggctcaggagttcgagaccagcttgggcaacatggtgaaactccgtctctactaaaatacaaaaaattagccaggcatggtggcaggctcctgtagtcccagctactcgggaggctgaagca[137 bp omitted]tcaactaatgggtctggcctccttctctgtctctccctcagcctccacctgggcacttcctagcaccctcccagtccagcccccagctggggcagctcccagccctctctcaatactacccactgtgggctgaatctcagtggtgtcccccagcaccttggtctcttcctctgcctggcattggtagttcccttatattcccacctcactcccaggctgcagaccatccttccacagccctgcccagccctgacttcaggctcttctatctgcaccccaccctcctcccattcctctctgaggtcatccgtcctccggaccctgttcccagtaccccctccagccccagccccctcctacaaattcttctctctcccagtagatgatccccaggttcacttctaaacatcacagaacaaactgtttgaactagccaaggtcacattcaaagttatttattcttttttttttttttgaacgggagtcttattttttatttttttatttttttgagatggagtctcgctctgtcacccaggctggaatgcaatggtgcaatcttggctcactgcaacctccacctcccgggttcaggtgattcttctgcctc[135 bp omitted]gcctcccaaagtgctgggattacaggcatgagccaccgcccctggctggctatttatactctttccctaactctgtccctggggaaccttctcccctcacttcccctggagttccctcccgacaaaacacactcacttttatcttgctgatactgtggcctggggaactgctgagccagtgtcttgcacaggttcctttggctgaggatcgaggaaggcctgccaaaagcaagctcaccctaaggtccccggggagagggcaccttggtgggcagagcctgaaggaagcaatagccaaggccgtgtggggctctcccaatgccagggaggtcccagccgagggagctgaccctgttctctctgtgccccctgctatctcccaggtggcccctgcacaggatccctcttcaccctgtcacctccctttaaccctaccaaggctcagatggagcagggggaaggacccagctctttagtcctgagatgaagttgctgaggtccagactgaccagaatgcacagccaccattaccgcttcacccagacacccctcaaaacccagaaaagcacgcaaggcaggtggcccccagaccccaggcctgagctcccctgcccccctgcctggccggtgcctccactctccaggtccaccaccagccactgagccacaccccctggaccagcagcagcaggagggccagggccaggccagggaggggcagggtggctgcaccggcccggcctcattacagccccacaagctcagtgatgggtggggcctgcaccatgaattcctcatagcgacggagaaacagctggaagcgagccaggtatgagtcctcgttgtacggtagctgcttctcacgtaggaactgggacaccacgggcttcacctggtggaagatgggcaggagagggcctatgagcaggggctgtgggcaggcccatcatcccgtcaggggagggagggacatcatcttcccacccccagttcctatcggccttgttccaagattctccggaggagcagaagggcttaagtcagagaattcttgtccctaaccctgcagaagaaaggagtggcttctctccgacatccagggatcctgactgcatgacagccctccttggcacagggggataaaaaccagagctcccttttaccaagcacctaccatgtgccaaacatttcagatatatttctccatttcatcctcaaagcctgtcaacagaagcccttctactcccattttacagaagagaaagctgaggcctagaggcattcagttcacttgtccagtcgccctgctagtaagaaacctgggtatctctgatctaaaacccatgctgctgtggatacactgggctgcccttcctgggtgacctctgaccaggccagttgggggacttggagttcaggtgaaccctgaagtttcctccctcccctcaccacctttttttttttttttttttgagacagggtcttactctgtcaccaggctggagtgcagtggcacgattatggttcattgcagcctcaacctctgcagactcaggtggtcctcacctcagcttccaagcagctgggaccacaagcatgtgccaccacaccccgctaatttttgaattttttgtagagatggggtttcaccatgttgcccaggctgctctcaaactcctgggctcaagcaatctgcccacctcagcctccgcaagtgccaggattatagtgtgagcaacgcccccaggccgaagaatcttcctttccatcctctaacagtccctttattccagcgcccccagcccagccctcgactaccttcaggcacatgttatcagagagcctggggaatagatggtgttccacatggcagctgatgatcgagtggccgaacgcccagtccagcacgggcagccgggccaggttaagcacccccaggctcatcatgtgaatccgacggggcttgttgtcccgggagaacatgggcagtccgatgtgctgtgacagacacgtgggtcacgccgggcagcctggacctccccaccccactccaggtgtcctgggacctcatgctacccagagggttcttgtgtcacccacctcccatgtggggggacctggtagaggggctcctggcccagctccgatgatgaccctgtctgttttctgcactgactctcatccatctctgggcctccctccccatctgaacagtgaggggcttagcctgcacacctctcaggtcccatggttccctaatgctctcaactgcctaccactcagtctcatcacaccgtgcccttgcctcattctggagagacccttcctgctctgttcaccagtcaagatcctactcatcattcaaggtcaagtttaataggcagtgtcaagtgcttcctctgccaggtgctcaggaactcagaggtcaggaactcagacatgaccaggagcttcggtggtttcaggacagaactcaattatgggattaagtaattaagtagttaacagcagttgtggtaagtgctggacaaggaagtacaggaagctctactctgaggccttccctgggcagggagcagggagacgtccctctggaaatgacgctggagctgaatgctgagccctggcctcccgtgaggaattccgtctccagttcctccatctttctcggggcaggcactaggggcctttatctcctactgcttggcatccgcgcatggaggaaggcatgctgactatgttgaggagaagctcacttcattattattattattatttctttttttttagctggagtctcactgtgtcccccaggctggagttcagtggcgcaatctcggctcactgcaacctctgcctcccgggttcaagcgattctcccgcttcagcctcccaggtagctgggattactggtgctcgccactatgcccagctaatttttgtgtttttaatagagacagggttttaccatgttggccaggctcctgacctcaggtgatccacccacctcagtctcccaaagtgttgggattacaggagtgaaccaccgcacccagctgagaagcctgcttcttccctgaaaccaaaactcgaatgatcctcagagcagggggtggtcgggaggggaccacttaccacaactgctgttaattacttaatcccataattgtgtcctgtcctgcaccaacccgaagctcctgttcacccctgatttcctagacctagcatagtgcctggcagaggaagcacttgacactacctgtcaaacttgaccatgaatgatgagtaggatcttgactgctgagagggcaggcagggtctctccaggacgaggcgagggcacagtgtgatgagagcgagagggaggatgcctcatccttcaggtggcccctctctcctcaacctagagtccagcctgtgatcagggcccctggagaatgctccccttagctgcccagcgccccaggttggggtggcctcacctggaagatgttgacgtggaggtaggggtgggccaacagggatctggtgaggaacatgcagcccagggctgagctggggttcttgaagcctgacacgttcaggagcagccagtagtgagaataaaggcccagagaaatcagggccagcgtccgcagggctgtcccgagctccaccttcctcagccgctctgccatagagggaggggacaggcaaggctcagatccatcaggaggggctccctgctggctcaagcgtgctaaagcagtggcggaggccaggcgtgttcaattcatacccacaacagccctgaaaagcagggcaccccattgtgtggatgaagaaacagaggccaggctcgatggctcaagcctataaacccagcactttgggaggccacggcaagcagatcgcttgagcctaggagttcgagaccagcctgggaaacatggtgaaaccccatctctatcaaaaatacacaaaatttgctgggcgtcgtggcgcacacctgtggtcccagctactcaggaggagcctggcctcccaagctcgggtgatccttccacttcagccccctgagtagttgggactacagttgtgtgccacctacagtaagttgagattgtgccactgcactctccagcctgggcaacagagcaagactctgaaaaaaaaaaaaaaagaaagaaaagaaaagaaaaagaaacaaagaaagaaacagaaacattaagcaatctgaccaaggtcaagccctgggatttgaacccaggtctagctgccccatcacccctgcctccctccaccatatgacatagctctcctgatatcaaagctgataacatgaagtattatttgtgcaaggcatctgcaaagcattttttttttttttgagacagaggctcctctgtagcccaagctggagtgcaatggtgagatctcggctcactgcaacctccgcctcctgggttcaagtgattctcctgcctcagcctgccaggtagctgggactacaggcgcccaccaccacgcccagctaattttttgtattttagtggagatggggtttcaccatgttgcccagggtggtctcaaactcctaagctcaagcaatccacctgcctcagcctcccaaagtgctaggattacaggtgtcagccaccacacgcagaccctgcaaaacatttttatacttaggacctcattttctttcacaccatacttgaggaggaggtacaggacccgaggctcagacaagttaagttatctgcccatagtccccagctagtaagcggcagagccagactcagctccaggtctgaggctctttctaccttgccatgctgtctcagcacgtatctatcgggccttcctctataagcagcctccatgaagccacgcaggggaggagagcaggggaactaggtccatgcaggacactgcggaccgggctctcatggcactcaccgacagccaccagtggagtggcgatggggaggaggaaaggagcaaggaacatgtagacatagcggttgaggcaaggcagcctccacgtgctggagtcccccaggcccaccacgttggtgtaggcatggtgcatcttgacgtgcccatgcgtggcgtgctctgcagtgaaggctgtgcacacctagaggagggaaccagaaatgacactggggtccctgtcaggcacagttgagcaatgcaggacctttgagagcccggagaacacccccacctcctcaaaccctgcatgtccagggccgtcctgccttacagccccagctaatccgctttgaccatcaactctcaggtatctatgaccacggagtggcagccagtcaatacaatcgtgtccgtttgacgaggctctgcaaagcatttgggggtgggaggctggacccctggagtgccaatctgccagtgactgcccaggcaatgagtctcagagtctgtcgtgattggaggcactgcaggtgatgaccccggcatccaatgcaatgattttgtgtgtgtttctcttagaagcatctgctcgttaataacactgagcactctcagcccggagcagcagccaggaggggctacaggagtggtctgagagagcagggacaccatcccctgaccagtccacaaggtgggggcggtgccctggtgggggccaagagcttctccctagaggtgactcttctgcagtatggatccccagtgggattctcggaagccgctctgagcagcagcacgtgcgctctgactcctaggagagtagtcagtctggaatgcaaaagccacgctaaggtgtttcttaagcagatacatgcaaatggtatgcagatgtaagcctcttccgatattttatctaggacagaagatgtggctaattttattgaagatgctgcctgtttctggaacgacgtgaaaagtttcccaataccagtcactgcaagccaggaaaggacagcggaacacccccgcagagggctcactgcaccaggctcagcgcccttcactcgcacacttcctgagggcggtggcggatgaccacatgctgctgagttagttggaaaatggatggtcctgctgaaaaagattatttattttatttttattctgttttgagatggagtctcgctctgttgcccaggcttgagtgcagtggtgaacctctgcctcatgggttcttggttcattgcaacctccgcctcctgggttctcctgccccagcctcccgagtagctgggattacagatgcccaccaccatgcctggctaatttttgtatttttagtagagacagggtttcaccatgttggccaggctagtctcgaactcctggcttcatgtgatccacccacctcggcctcccaaagtgctaggaacacaggtgtgagccactgcgcccagccccatttgttctttcatgcagttgtttgttcacataagcattgtcggacccccagtggtgcccagcaccatgctaggcctgtggggttcccagggccttgtccctgggaaaaggaagagaatgccatcagccccatttgatgggctcattgccgactgtacgggacccactcccatcaggataaggtgctctcgaggactattcttgctgtggccctcaccagggtccctctctcatcccaaaggtgtctaaaacatggctgcattcacacagatcctgccccagagccagcccgaagagttccctgaggacttgcacctggagacttgtacgctccctgagcaagactgacaggtgtagcaaatgaaaatacaggatgccctcttaattctgaatttcagataaacaaaaaatacgtggaatatttgggatatacttatacaaaaatattggttgtctgaaattcaaattcatcaatgtgtgttaggccattcttgcattgctaaagaaatacctgaggctgggtagtttgtaaagaatagaggtttcacgggctcagcgttctgcaggctgcacaggaagcttggtagggaggcctcaggacgcttgcaatcatggcagatcacaatcgtgacaaccgtggcagaagtccacagggaaggggaagagggagcaggcagtgacatgatgaaagcaggagcagcgagacggggataggggtgccacacacttttcaatgaccagatcctttttctttttttttccgagtcttgctctcttgcccaggctggagtgcaatggtgcgatctcggctcactgcaacctccacctcccgggttcaagcgattctcctgcctcagcctcctgagtagctgggattatagtcacacgccaccacacccagctaactttttatatttttagtagagacggagtttcgccacgttggccagactggtctcgaactcctgaactcaagttatccacccgcctcggcctcccaaaatgctgggaatacagcgtgagccactgcgcccagcctaaatgaccagatcttttgagaactcaccgtcactctcaccaagacaacaccaaggggatactgccaaaccattcatgagaaacccctccatgatccagtcacctcccaccaggccccacctcctcctcactgtgcagtagcagcagcagctggccactggggttactgcctttgttggcaaacttgggtttatctgcctgtagacaagtctctctcacaccaacagaactaccagtacttccaaaaccaactcacctgatctgcaactcaaaggcatttttttaagaaaaccacaaaaaaaaaaaataaataaataaatattacatttcatcctgagatttaggtgggacaaacatcaaaatcatatcactggactttttgtattttacctagaaaacctactactgaggtccatggagccccagaagcccccagcattctgaagccagatgtgaaggggctgctcatgctgtgggagccagcaagagtctggagagaggaacggaagctacgcagatccagcccggaagccctcctgccagaccaacgctgcccctctgacgaccctcaatccctctttctcatcctggtcattcctgctgcccaccactcctgcacctcttccttctccccacagataccacccagacaaccaccacctacaccctcctccttgaaccccatccctgcccgtctgtccttaccatctctcagcctgcccatgccaacaccttcgtcccatcttctgccttgtctgcctcaaatccagtagagtgacacagttaaaacccaaaactgcatcataatttcataattatggtcttaatcctgtagtgtactgtttgtttaaaaactaaatgaggggccaggcgtggtagcttatgcctgtaatcccagcactttaggtggccaaggcaggcagatcacttgaggtcaagagttcaagaccagccaggcgcagtggctcacgcctgtaatctcagcactttgggaggccgaggcgggcggatcacgagatcaggagatcgagaccatcctggctaacacagtgaaaccccgtttctactaaaaatacaaaaaattagctgggcgtggtggcgggcgcctgtagtcccagctacttgggaggctgaggcaggagaatgtcatgaacctgggaggtggagcttgcagtgagcggagatcccgccactgcactccagcctgggcaacagagcgagattccatctcaaaaaaaaaaaaaaaaaagagttcaagaccagcctggccaacatggggaaacccctactaaaaatacaaaaattagcagagcgtggtggtgcacgcctgtactcccagctacttgggaggctgaggtaagagaatcactgaaacccacgaggtggaggctgcagtgagccgagattgtgccactgcactccagcctgggcaatacagtgaaatcctgtctaaaaaaaaaaaaaaaaaaaaaaaaactaaaagaggaaaatattagagaagaacatagaagaagagactgataacctccagccatcatcttccaggaggaaatgggacatctgcagaaaggggtaggacaaagacctctcccgatgctttttgaattctgaatcatgtaaacacattacctatttgaaaaataagttagttttgaaaactaccaacttagattaccacctttggccacaagaccaagttccaggtcctctgcctgccatacgccccctttcccctctccagggtccccattggattctggtgacccctgattcctgagggtccctcatgcactgtactgcttcccacagcctttgtccatacatttgttctgtctgaagccaccttcctgctccttagtttggccaactctgtcctgatagcatctcccctggaaaccgtccctggagtttctcagccctgcatgattcacatttgggactcgggcactttttgtgtcagggactgtcctgtgcactgtacgacatttagcaatgtccctggcctctacacactagatgccagtagcatgcacacgcacacacactccagtctttttttttttttttttttgagacagacttttactctgttgcccaggctggagtatggagtatatggagtatagtgataaaatcttggctcacagaaggcttgaactcccaggctcaagcaatcctcctgcctcagcatccagcctcccaagtagcttggactacaggtgcacaccgccacatccagctaattttagttttgttttgtagagacaggctctcgctgtgttgcccaggctggtctcaaactcctgggctcaagcgatcctcctgccttggcctcccaaggtggtgggaaccactgggcctggcccacacccccatcttgatagccaaaaatatctccagacactgtccaatgtccctgccctgctcttcccaccctgagctctcagagctttcactccaccctggtcaatgccctcatcacattctgcctgccccagtcacctaccagctggcgtggcattgcacaagtggcttaaactcccagatcagtgttttctcatctacaaagtgagggtaacagtagcttaacccccatagggaggtgcgactctgaaatgaggtgatttacaaaaaggatgcaggaagcagccagtaagccttagctagtgtgatcaggatttattattaattatttttaagatggagtcttgctctctcaccaggctggagtgcagtggcacaatctcagctcaccacaacctccgcctcccgggttcaagcaattcccctgcctcagcctcctgagtagctgggactacaggcgtgtgccaccacgcccggctaccttttttcatattttagtacagacggggttt[141 bp omitted]ttttgcacttgactctgagtccctggggaagtggaacggggtcttattcacagttatgtccccagcatctactggagcatggtgtaggtggagctgagacaccacacacacacacacacacacacacacacgcgcgcgcgcgcgcgcgcagagtaccaatgtccgtttccttggttttgatattgaatgacacttagataaatgtaactattgcgtgaaattggatgaaggctacaccagacctctctgtcctatttttgcaaggcctgtgaatctataattattttaaaaataaaaaagcttttacaaaagtatattttgtactgcaaatctgagttttctctccaaataaatactaaaaattaaaaaaataagaagttgtagttgaacttaggcaacagctctcgaggtttgcgtgggaacaggcagagagaaggttggagagacggcctggagggtaatggtcacactgaacgcctgtgaggagagaacgttccaggatcacgacttaggcgggggttcctggccctgtttccacccccacaagagccctgaaggaagccgatgacattctcctacaaggtgcccttcccccagggcagagctccggtccagcagctgtggctccaagcctgcagcacaaagccgacttcacatggaggatttgaagcggagacaccagagcttcggaactggcagggcctgttccctcccactcaggggagcatcttggattgtgagtgacatgcaggagagtcctttcaggagttaatctttcccaagcttcggggcttaaattacgggggcctgcccatcccacactgcccccaaccttcccgtggccatctgagcatggtacagtgcccttcattggcagtccctgagaatacgcctggcagtccccatggtgacccaggacagggctgggcaggtactctcgctgggtaagaccaaggttatcagtggcaggagagaaggtcagggttaggctaccaggagggatagaactttcctatgtggaacacaaatgggtcttcggaggttggatactttaggagagaaacaacagcctggagtggaagcctccccctccaacctgtttgcccctcccccagatccaatggcccagcttggagctggtaaaccctgagacaatcccagcaaaagctgggcacctgggaccgccaatgatactcagttaatgcctgaggctgcagcatttgccaaacaccaaaaggagcccagggcctatggctgcattattctgcaatgaagatgtctcctgagcgtcaaggtttgggaaaagcacagatatcccacaaggaaggatcctaagagagaaggcaccaagacatgggaggagagtcagaaatccaggaagggtcttggggcatcctctgaggtcctaggcatcaagaacgtgtcctctgcaccctgcagaggcccagatgacacagcacccaacgccccaacatatacacagccctgttgagctttgcaaacttgcagttaaaaaaaca[141 bp omitted]tgaaaccctgtctctacaaaaatacaaaaaaaaaaattagctggacatggtggcgggtgcctataatcccagctattagggaggctgaggcgggagaatcacttgaaccctggaggtgaaggttgcagtgagccgagactgcatcattgcactgaagcctgggcaacagagtgagactcagtctcaaaaaaaaaaaaaaaaaaaaaaaaagacaaagcaaacaactgctaaccctttccttgcagctgaccacattaactccagagaaagaaagtgaagatcatactggtggagggtgtcaggaccaggccctccattaaggtctgcactgtttcattttatccacatgctggcctcatgagggaggtcgtgttatttctcctgtttattaggtgaggaaagtgacacttagatgttgaattaagtaacttgctcaaggtcagggcagccagtggggctgggagttcaac[139 bp omitted]ccagcagtgcacttgcctcaccaatgtcagccagactggggagactggtctgccccttcccccacacttggaactggaccctccccagagggtagctggagggcacctgtgggatgaaaaaatcaagacgcatcccacgtaggtcagtcggaggcttgagtaataaactactcgggccctgttcctcagcccactgcagtccaccaggcaggtgtcacgacatgaagcgggagccaagcctttcctccccagcttcgagggggcttgcaggcctgaacctggttccctagacaactgcagggtcatcgtcagcaaatattgatggaagaatattgccaagagctcaagtctgtgccaggagctgaagagtcaaagaggcaaagatgaagccactgggcttacggggacaagacagcattcacaagcagaatgcagcactgaggctatctgggtatctcaagcgtgctgggtttccggtggagcgctccagtagagaagcccaggaaggcttctcagaggaggcgtccttggcctcctgcattcatttggcacacatgatagctatggtgtgggtgtaacactttggtgggtatcagattcacctgtggaacttggtaaaaacacagtggcccgagtcctcttctccagcaagcctgggcctccagatcattctgctacacaccgaagtttgagaaccactaggttacctctgtgcaataaatgccttgcagccaagcagtcccaaagcctcagtacctgctcctcatc[131 bp omitted]tgcccggctaatttttgtacttttagtagagatcaggtttc[132 bp omitted]tagctcattctgcccctgtgacccagcattatgacacagtccatgtcaccagcacagcccaatgtctcccttgcctctctgtggattacaaacttggcgggcagctgacccagactccagagcctggcccgtgtcttagagtctggccgggactaatgctcagggctccgtgggaaaggaattgtcttgaaattgaccctgaggatcagaagcctgtcagttcctcttgtcttcagcactttgatgtgtgtgctggtgagaggggcaggggaggggaagaagcaggggatagtgctaggtgagaaatgcttcatccactcagctgagtggatagtgatgatatatgtgtgtgtagacagttatataaagttatataactttataaaaacttaataattgagttaattggtcacaacgaccagtccttccagaaaagaactgtttctggtcccagctttcctatttattcataaggtgtggccattcatttatttaggggaaccatcacctgggtgaccaggcgacggtccccctggaaaggaggagggagcaagttcagcagaggaactggggaggcctggagaccagtcaagagagaaagacaagctggtcgaaacttttgccttcctgggcgtgcccgaaggtaagaaggccaaggtcgaactgggaaggggtggaagaagggagggcaagggtcaggtgaggtgggtacttcctggagctgaccccggggagcagggggcttctcaggaaggctaggccatggccaggcatcagaggagcatcatccggagtaaggacgctgccccttgtggacactgggcccctcctccccctccctttctgtctgtgggtcacattttaaaccctgactgcaaaatctggaggccccactggttgtaactgtgggccaagacagcggcatactcatcctacaactctctacccatggggtgcaaagacccgctcaagggcttggagaagtcctcagacacgctgtagtgcatactgcaccagtggaccggcataccatcagctgcagcggcctgcccccgtgggcacatgcacagctggacacacccgcatgctcgaacagaagaatgaggctgccacacggtcccagcagctgcctgcatcctccttctcccaggctcacctccacaaagaaaagcagccagatcttgctccagcgtttggactcggtgagggccccatgagtggccaggtggctgcccttgacagtgagtgtgtagtggcacacacccaagatggtgatgccggatgcaaagaccagggcattctcccagcgcaggcacaggaagcctgcgtggagaggaggaagaagacgggtctttctctagctctgggtgatctgggcccaaatacctcaacccttaccctgggagcccaggctaaagtgggctaggctctgggggctgccactggccggagtgaggcaggtcccactgtggcctgaggggaaccaggactgcccctccagcggtcctgactctcccgtgcctggtcctgactctccagtgcgtggtcctgggcccccagccaaagcaatgttggggcctcaggtaccatgggtgttccagaccaggaagggtccaggggaaactcccaccccctccccactcacctaggtccccaaagaacaccgtctcccttcccgggggtgggggggcacctcatcactcccggccactcccccgctcctctcaactttcccttccaccaccctcctgcgccccctcctagggtacacagggcagaacaccccagtccagactctcaggttcggggtgtgaccctccatccttgggtgcggggccccgaccacctccgcctccctgccgccgccagtccactccgcaggctgcactcccacggctgctgttgcagaccccgcgccgccacctccgccgcaccccgcccccacccgcagcccggccgggacgccgggtccccgcgttcctcacctgccggcaaggcgaagaggctgagcgcgaggatggcgcagtccacgccgtggcgctcccaccaggagctcgtcctcaccacgtcctgcaccagcacctccagctcccgcagcagcgcctcgcccccacggtgcgcgctccgcgccggttccatgggctccgtaggttccatgggctccgtaggttccatgggctccgtaggttccatgggctccgtaggttccatcggctccgtgggttccatggactctgtgggctcgggcccgacgcgcacggaggactggaggactggggcgtgtgtctgcggtgcaggcgaggcggggcgggccggggcggagtcacgcgccgcctggggacacccgcccccggggtcaaggtgcgagacaccctggctcctctgctgcgggcgctggcgacccaggcccggctcaggcgcgcgaccctggcaggcggcatcagaaccgccgcggagggaggagccaggccgatgagctgagagtggctaggcggggaggcgaccctgcggtgagacccagcccaggtagtagggacggaggcgtcaggggcacggagaccccagtggagacaccccccacccccgccccgccccgagggccttccctgacctccgacctcaaataactccctgagttccctcggtccctgagatctgtccgagcattctcttccctcgaccctgactattcgtagtggcactgagcagctcccctcgtacgtgacacacatgacacatgctgtcgtctgtctctgccaacagacggaccctcagtgccgtagagacgtcctcgttttgcccaagctctgtcttcagtacctagggcaatgcttggcacagaaacatctgggaattcctagggcagaaagttcaaggactccccactccccctccccgtgggtcaaggagtgagaggtcccctctgagtatggcttcagcagaggtgacccaggggagctggctcttcagcccaataatgttttgggtgagacgggtagctacagggaatacacatccggaggtcatcattctgggtgggcaggcagaccagccgggtcccgctgccattccactccctcaagagcgcccaggcctgaacccagggccagggcctcagccaagccctctgagatgtgggagccacacctgtcacatccccttcccatcagcccaggcccccaccccgcactgctggagatggccttggtcctcaggggataagcctctgtcctctacaaactcctcttccctgcttctgaataccctttctcttttcttttttgttttacttactcccagtttcatgacttaagggatctggtatggtgaggacagtggcatctttagcaggagacccctaggaaagagaagttgggtgggtggggtaagggagagacagtcagggatcctaatgacattgattccttttgactccttcctggtgttttccttcaggaattcttttttttctctctttgtttagaaacagggtctcgctctatcactcaggctggagtgcagtggcacaatcacagctcactgcagcctcgatttcctaggctcaagtgatcctccccctcagcctcctgagtagcttgggactacaggcacacacggggaccactaagcctggctaatcatgaattcgtatgagcttattcctttaattctttatcaaagaataagatttatttaccagctcagtattctaagggactgacaatttaataaaccaattctcaccaagtgcacgtgcgcatatacctgccccgcaggttatcattgactttcacatactgatgaggttttgtggattccccacatccctcaaggatggcatcatctaaggccaggcgcggtggctcacacctgtaatcccagcactttgggaggccaagacaggcagatcacttgaggtcaggagttcgagacctgcctggccaacatggtgaaaccccggctctactgaaaatacaaaaattagctggacgtggtggcaggagcctgtaatacaagctattcgggagactgaggcagaagactcgcttgaaaccaggaggcagaggttgcagtgagccaagttcgcaccattgcactccagcttgggggacaagagcaaaactccatctacaaaaaaaaaaaaaaaaataggatggcctcatcttcatttaatcaacggaggccccaagagatgaactgatccgcccagcactccacagttagtaaatggcagaattagagctgaatccaggagcttctccaaatgcaatggtttccatgagagattttcttttttttttttttttgagacagagcctcgctctatcactaggctggagtgcagtggcgcgatctccactcactgcaacctccaactccctggttcaagtgattctcctgcctcagcctcccgagtagctgggattacaggcacgcaccaccacacccagctaatttttgtatttttagtagagacagggtttcactatgtcagccaggatggtctcaatatcctgacctcgtgatccacccgcctcggcttcccaaagtgctgagattataggcatgagccaccatcttaagagattcttaagacagataaggaagagtcgccctcctccctccctttcccactctaccgtcaaatccctccctctctagcatactacaattttcaaggaggggatatgtataatttgtaaaagcatatgtgatattaatatcccatattttaagcttataaggagatgttatcatttttatcatatatgccaggaacttcctggcaccaagaagctcctctccaggccctggctccctcctggacatccaagtggtactggacagaggtaaatgctgagcgccagaggaaagaacatgtttcagaggagctcagaggaacagggatccctgtggggtagggctggctggtagcctcccaagagagaggcagacttgatttagaacagacttagcatggtggctcacaactataatcccaacactctggaaggctgaggttcaaggatcgcttgagcccaggagttggaggctgcagtgagcgatgattgcattccagcctgcacgacagagcaagaccttgtcttaaaacaacaatgacaataacagcaaacagactacttaaacctcagagagaaggaagagaaccaagtattctgggtcctcaaggcatgggccaggagtagagtttgagagattggtgggaaaggcaagggaaggcaggaaagaaaggctgggaccacgggctggagtgccacaaaggcagactgagaagctgaggtttgtcctcacaggcatgggagccataggaagtttcagggcagtggagtgacttgtgcaatgctgtgttcaggaaggtttgtctggcacaatggagtagccactggagtgagggggaccggagtgagggggaccagtttagagacgttccagtcccccaaacataaaggtgctaagggtgcagatagcagagggagggactgtggaaatgatgatgggggtaacaaaataaggaagaattgaatagacagtttaccaaagaagatatgcaaatggccaagaagcatgtgaaaagatgctccccatcattagtttttagggaaatgctaatttgaacaccaataagataaccctgcagacccactagaatggccaaaattaaatagacaaggaaggctgggcatggtggctcacgcccgtaatcccagcactttgggaggccgaggcaagcagatcacctgaggtcaggagttcaagaccaacctggccaacatggggaaaccccatctctactaacaatacaaaaattagctgggtatggtggcatgtgcctgtaatcccggctactctggaggctgaggcaggagaatcgcttgaacccgggaggtggaggttgcagtgagctgagatcgcaccactgtactccagcctgggtgccagagtgagactccgtttcaaaaaaaaaaaaaaagaaaagaaaaaagaaaagagttttatttaagttgaacacatgcatatcctagatatatactcaacagaaaagcaaagaaacatacacaaatattcatagcagcactactcaaaagataacaactgggcacaatgcaattttctgccagcagtggaataaatcaataaacggcgatggggggattaccacacagcccaaatccaatgccgaacaaatggaaaccagacacaaaacaccgatcagatgatcccatgtgtataaagttcaaaaacagacaaaatgaatctatggcattagaagttaggatggctttaactgattagggatagtgactagaagggggcatgagggggttctccagaggctgataaatgttttgtttcttaaactgggttctagttacccttgagtgttcagtttgtaacacttcatcatgctatactgttagagtatgtgcattttcctgtctaggtgttatattttaattacaacaattttatattttcaaatggtaatcacttttctttattttctttatttattttgagatggaggctcattctgtcacccaggctggagtgcagtggtgcaatctcggctcactgcaacctccatctcccaggttcaagtgattctcctgcctcagcctccctcagcagctgggattacaggcatgtgccaccacacccagctaacttttttgtatttctattagagatgggatttcaccatgatggccaggctggcctcaaactcctgacctcaaatgatttgcccacctcggcctcccaaagtgctgagattacaggcgtgagctaccttgcccagttggtaattggtttttgtagaggtataaatcagaaggtaaaatcacccctaaacccaggacagtggagcgggggaaggcagggcggggctggcctgtgggttcccttggccatggggtcggcatgagtgtgggtgggtggtagagcggccaacctacccctgccagctgcccccagagtctgagtgacacccctcaactcctccctatccctctctgtcatcttgccttgacctctcagccactggtcctccccatccctgcctcgggatcctgctcacaaagtgaggctgaattgtcaagcctgggacgaagcgctttggatggcaggcctgcactcaccggggctccctgcttccgtgtttcccaacaggccctagaggcctagtaagcaggcctgggcaggctccttaacctctttccacagtggcagaaacagccaggggctgcctactctcccagccaccctcccctagacttgcctctgcccccacccaagccctcatctgtttgcacaagactcagcataagtgaagagcacagcggggttttggagtcaggcacacttagtagctgtgtgaccttgcacgagttactcaacctctctgagccttggtagcttcacagacactaaaaaacagacatttaaagaagtgagataggccgggcatgggggctcatgcctgtaatcccagaactttgggaggc[131 bp omitted]ctactcgggaggctgaggcaggagaattgcttgaaactgggaggcggaggttgcagtgagctgagattgcgccactgcactccagcctgggcaacagagcaagactccatctcaaaaaaaataaataaaaaagaagtgagataaatatgaatgggagtttaccattttcttcctgtgccccagtggattaatgtgcacacccacgctggagaccactccaaacttctgacaaacataaggtcttttagatcttaggctgtaaaagtaaagtagtctgcagcctaaggtctaaattgcttagcttggcatttgaaggcctccaagtaccagctccatctccggataccctcctgcttgggctggagtgaagctcaccgatctctgactcacggataagtgttgccttttctcccctccaagcctttcttcccaggttaactgtctctactcctatcccccaaccaagccccactcttcctctgggtttctggcaacttcacccgccaccgcaaagctcttctaatgttttcgtgtatttcattcatcctatgttattgagcacctactatgtaccaggcactccacctttcaccgttcatccttcccctcctctgacctcatacccactaccagctagcattagacgtcacacattacctcgcaatgagcactcctggacactgtgatccagccacaggattcaagctgttcccctgtctgcatcgtctgcctgtatcagtcaggataaacactagctgttgtaacaaacaaccccaacatctcagtggccaaacacaatacaggtttattcttgctcccatcacagtccaatttcaggttccttgcatctgtgatgcctcctccaacacagggctgccccaggattgccaggggattggaagggagaacatgggaaggtagttttaggtccaggtctggaggtggcacacatcacttccatccacgctccactggccagaatccaggcatatagccccagccacaggctggcttggaactgtggcctttctgtgtacccaggacgaagaagttgcataaaggactgtatagccaacctctcccctgtagccaactgcactgtgagcttccaaaaggcaaggatccttcccacgccttcctgatgtttccctgaatctcctccataacttccaaccggcctgcctaccagtgcatatcacccacccatcatgcccagcacactgccctgtacccagccggtgctcagtgtttaccagctaatggatagactagtgtgagttgaaacaggttggctgaaggagaagcacatagggcttggtggagagacaggtccttcctgttctttggacgacacggcttcccggacctcacgctgtgcttggaacatagtaggtgctcagtaagcgtttgctgactatatgaatagacagatgcatggaatgatgagaaaacaggctcaagagaatgaaggaggtggtaaaaggtttgaaaaaatattcaatggtggaaaagactcgagtccaaagccgagacaaacaataccttcccaaacttcacctggatggggaggtggtgccctccaccccagccccaacagactgggggcatctgggcctactcaggccacaacagtggggcagggtgtgtcagatgagccagggcttagccttcctgggccctctggggttccccatcctggggcagtgatgatccctcccttctgtgattcggatctttatttgttggggttcactggggttaattattgttgtggttgtgtagggtggtgggaagggccccaccctggtccagggcctggaggggaatcccaagagtcagatgagtctggagacctggagggctggtaccagggctcagggatggcactggatggcttaagaaggcgccttctgccagcaatttaactgtctctatgccctgagcctaggtggctgagtctttaacccttccttgtacctcttccattcatgccaccctccaaatagtcaaagcctgagtgaggcccagctccataaagcaactggcattattcacaggggtggggctgggcaagctgcgggagaagtggcctggcctgtggctcagatcccggccagctgggggtgggactggcaccctgagataccctggctccagcagggcagggctacatctgcagcatctcagcatcagccacacctctcagaaccctacccttggccttctgcggctaccccaaagcctgcaactggtgttcccaggcagctgctttcctgtggggacgacgccaggttagtgatggcccagagaggcagggcaggggagggacgggagggatggagagagccagcctctagctggcaggggctctgctgaggctccaagggctgttggcctctcctcaccttgcaagaagggaaactgaggactgagccccaggattactctccgagctgcatagcaagttaggtccttggcaacccagagctggggctgtgagcagcgcagacactgttccacttggtctctcctctgcgtcagatcagcaccacggtcccttgagtgagtggctctggggtgtagattagcctaaaggatgtgttttgggcctggtgggaccagtgccagagctgggaggggagtgagggctgtgattcctacaaagtgcggaggcacccaaaacagagtctagagcaggactctggatcagacacacccaggttctagttcttgccgttacttaggtgagttgtttaacctccctgagcctcggttttctgagagggtgatttggagtgaatgagggtgatgctacccacctcattggatctctggggagagcaatgacatcatttctgtactgtggatatcatgggccacagcagggcacgtgctcgtggtagatatcgctaccacaaacacctttccttgtgttatcgtaaatataacatgattgtgatactgagttgtttaatttaaatctagcatatattgctactgataatgacaatgaaaaatggttttggtttccagcaggaaaggaacctgaacatgcacacgctctatttcctctcctcttcgcccatgtcttccctcgagggctgggggccaagggagtggtgttccctcctagccccgctctgtaatactgaacaggctgtgcaaaggctgtggtgggcacggaaaggggggtttgggagcaacccagcctatcagttctctctgacaccagctcagggctgcccaggcctggctgatgcccactgagccctccctatccccagattcccatccgccaggtccctgggctgctcctccacccactgggcattgagtcctgagctaagtgctttacgttcatgctcacaactgccctacaatgggcgggggggtggcattcaatcatccccactcacagatggaaacactgaggcttggaaagctgagctggcctttctaggaagtagcagagctatgcactcaaactggacacccctgcccaggaggagagcccacccaggcccctcagcaccctaggtgccccaagaggtagacttgcctccaccccatcccatcagttcttctcccactacagcccaccctatcccccaggcctgggacccccaacaagccagtcacccagagagagagtgggggactctctctgtagaaacccccagttcagggtgagggtggggcaagggaaggtggggtgtccaggagcttcaatcttccagtctaaaggaactggggccctaa[140 bp omitted]acggagaaaccccatctctactaaaaatacaaaaatagccaggcttggtggcacatgcctataatcccagctacttgggaaggctgaggcaggagaatcgcatgaatctgagaggtggagcttgcggtgagccgagatcgcaccattgcactccagcctgggcaacaagagcaaaactccatctcaaaaaaaattaaaaattaaaaattaaaaaaaataaaaatagaatccagctgaaagcgatggagccctctgtgggcgcgcacccacacacacatgcacacacacacatgcacgcacacacacacacacacacacacacacctctcttctgagaaacttggaggcactgaatcaaagacaaatgagcaaaatcacagacacacactcagctcacaaataaacaccaccagcctgcatggtggctcacgcctgtaatccctgcattttgggaggcctaggcaggcggattgcttgaggtcaggagttcaagaccagcctggccaacatggtgaaacctcatctctattaaaaaaatacaaaaagttagccgggcatggtggcgggggcacctgtaatcccagctactcgagaggctgaggtaggagaatcacttgaacctgggaggtggaggttgcagtgagccgagatggcaccactgcactccagcctggatgacagagccagactttgtctcaaaataaaaaataaacacaacctccaggaaagctctaacccactacacccaccccatgctcacagagatgcgcgtgtcctcacccatgccacacacacacacacacacaggctgcacaggcacacatgtgcacacacaagcatacagatgcagtggtgtatccagaggagggaggcgcccagggacagagggagaggagaggcagtgagtcctgccggtttcccaccccacctccccatgtcccaccagttgagcctgtgttcctggtctgttcctggcagcccctgtgccaggtgagagcctggagagatggtttggtgaatggggtggaagaaggcttggactgccgtggaaacagccagagtttaaggttcaaatcccacagtcccgatattctgcactccaaggttcagagaaatgacttaacctgcctgagtgcagtttccttgtcagagaggcaggtcaatgagaccattctcatgcgtttgccgtacctggtatgtagaaggtgttagatacatgttttgagaaggcatctagcagactgcagcaatgtaaatggaccagactatacatcccagctgatggacttcctagtgggtcatttgccatcccccacctgaacctcagttgctgcatgtataaaatggggctagtcaatgatgccttctgcctggtctatctcagacgactgttgtgaggctcaaaaaaatgacactgtgaggggtggtttggtcctgtgggggagagagagccccatggggcagtgatgttgggggccggggaatcactggcagctgcgttttcccccatcccctctcctccatgagaacacccctcccccacccgccaaggaacccaccagttattgtttggggtccagcggagaaactgccccaggatgtgcatttccagagtagggaaatgctccagccagagtggtgttgggggccaggagtggggaatgcattttcatatgggggttggaagaactgctccctggaactgcctaggacccacctgctgagcagctcggccaaccacaaatgcaacgaacaccccatggccagtctcagaccaacaacaaccatgaccattattaactcgtgcgtgctaaataccagggagtgtgctgggtgctttctatgcatcatcatttcaccctcctaataacttatggggttaatgctgttattataatacctatttttacatatgattaaacagactcagagaggctgggtaacttacccaaggccacacagctggaaaggggtggagccagttttgctgcccaaacctggctgtcccctgagtccttgccacctcccatacaacctgggccaatctcagagaaggtcacagacatagcacacactggagggacaggggtgccatgctgttggggactggtcataacatggggacagaaggcagcgggcaccgtcaggagacctagtgctgccttgcccacttggtgactcagcgacctttggccagccccttcccctctgggtctcagtcacctcatctgtaaaatgagaggattgggccatgtcccctggaggccctctctgcctctgattcactccaccacccccacctccagtaagtcagtcatctcatgtaggatgtgttcatttcacagctgtctaaccaaggcttcttaaccaatgaggttcccgcacctctccatgaactacctggggtatgagcaaaattgcacatgagtgtgtgtgcacaatttgcatttttctaggaaaaacgtccatattttcaccagagtctaatcccaaaaggctgagaaccattaattattctaaactttcaaagtttctctcatctttttattttattttattttacttattttttgtttttgagactgagtcttgctctatcatccatgccggagtgcagtggcgcgatctcggctcactgcagcctccgcctcccaggtttatgcgattctcgttcctcagccttccaagtagctggcattacaggcgcctgccaccacacctggctaatttttgtatttttagtagagacggagtttcaccatgttggtcaggctggtcttgaactcctgacctcaagtgatccacctgccttggcctcccaaagtgttaggattacaggcataagccaccacgcctggacttttttttttttttttttttttttgagacatggtctcactctgtcacccagattggagtgcaatggtgtgatcatagctcactgcagccttgacatccccagctcaagcaatcctcccacctcagcctcttgagtagctggtgtcttcggaattggtgggttcttggtctcactgacttcaagaatgaagccgcggaccctcacggtgagcgttacagttcttaaaggcggcgtgtccagagtttgttccttctgatgctcggatgtgtttggagtttcttctttctggtgggtttgtggtctcattggcttcaggagtgaagctgcagaccttcgcagtgagtgttacagctcttaaggtggcatgtccggaattgttcattcctcccggtgggttcatggtctcactggcctcaggagagaagctacagacctttgcggtgagtgttacagctcataaaggcagtgcggacccaaagagtgagaagcagcaagatttattgcaaagggcaaaagaagaaagcttccacagtgtggaaggggacccgaatgggttgacactgctggcttggcagcctgcttttattcctttatctggccccacccacatcctgctgcttgttccattttacagaaagctgattggtctgttttacagagagctgattggtccgttttgacagggtgctgatgggtgcatttacaatccctgagctagacacaaaagttctccaagtccccactagattagctagacacagagcactgattggtgcatttacaaacctcgagctagacacagggtgctgattggtgtatttacaaaccttgagctagacacagagtgctgattggtatatttacaatcccttagctagacataaagattctccaagtccccactagattagccagatacagagtgccgattggtgtgtttacaaaccttgagctagacacagagtgctgattggtgtatccacaatcccttagctagacataaaggttctccaagtccccaccagattagccagatacagagttctgattggtgcattcacaaactttgagttagtttatgtttgcatttacaaacctctagctagacacagagtgctgattggtgcatctacaatcccttagctagacataaagtttctccaagtccccactagactcaggagcccagctggcttcacctagtggatcctgcaccggggccgcaggtggagctgcctgccagtcctgcgcaatgcgcctgcactcctcagcccttgggcggtcgatgggaccgggcgccatggagcaggcgacagcgctcgtcggggaggctcgggccgcacaggagcccacggcagaggggaggctcaggcatggcaggctgcaggtcccgggccctgcccctcagggaggcagctgaggcccggcgagaatttgagtgcagcgctggtgggccggcactgctgggggactcggcacaccctccgcagctgctggcccaggtgttaagcccctcactgccgggggcccggcggcgctggtgaccgctccgagtgcggggcccgccaagcccacgcccacctggaactcgcgctggcccacaagcgccgtgtgcagccccagttcccgcccgcacctctccctccagacctccctgcaagctgagggagccagctccggcctcggccagcccagaaaggggctcccacagtgcagcggtgggctgaagggctcctcaagtgtggccagagtgggcgccaaggccgagaaggcacctagagcaagcgagggctgcaagggctgccagcacgctgtcacctctcaatcccccctgtaaacaggacaccccaactgctgttgggaatttggccaatgaccgttctagctacttcctgctggataggggtgatgaaggggccctgcagctgcagtgtcctccagaggggtgctctctaggccagtaaaagtgccagcgggtcagtccaggggtcctcagtagaagttgttagttgaactcatttggggttccatttgtaagaccatctgtagcttgatggcctcgattctagaggaaacaaatttgacaagaaggttaaaaatacagggcccaaaggcaagtaacagcaagatggctgccatgggacctacaaggagagaagccatgttgcccaactccagaggttggtataagaatttgaaaggcattgcctgatttcagaagccttttcctgtaaacgccaggtggcatctcttactatccctgactggttagtgtaaaaccaacactcttcccctaagaaggtgcagagtcctcctttctcagcagtgaggaggtctaggcctcggtggttttggagagtcactgctgccaaagagtctatttggaattgtagagtaagaatagatttcgttatttcttgcaaactgtctgagaaatcctttgagagtgtgtggtagtaggataatgaagtagataaaccagctattccagttcctgtagcagtagccattcctaaccctataattaggggtattagttgtatggctctgcactgacggacttgagctttgaggggtactgataaaagtctgatttcctggggcaatgttaatgttgggacttagaaagactaaggtgccagtgccggtccagttagtggggaggcagatataggtcgatgttccacataagaagaatatgccttggctgggtaggcagaactttacctggcttttaaaggaatagggtacactgttttttctttactatttctatctctctctttctctcttcgacttcttctttgtctctctctttctctctttctctctgactccccctttgtctcttcctctctttccttctttttgtctctgtttcttcctctctctttctctgacttcctgtctctttctctctttcctttctgctgcctctgccagctgcttatgctgctgttctcctctctcctccagacatgctgcctttaagaactgtaacactcaccgcgagggtccacggcttcattcttgaagtcagtgagaccaagaacccaccaattcctgacacattttggcaaccttgaagggactatcacctatcaccaagcggtgagaccattgtgtatcactgagtgaagggactatcacctatcgccaagcagtgagtaccatcggacccctttcacttgctattctgtcctatttttccttagaatttgggagctaaataccgggcacctgtcggccagttaaaatccactagcatggccaccggactaaagacacggatgtcaggctttctgggaaagggctctctaacaatcccctactcttcggagttgggagcgttggtttgcctagaaccagcttccacttttcctgtacttctgggctgagccaagcgttgacagagaggaaagccatgcagctctggggtcccaacaacaagttggttgaccctgtggccatgagcagaactctcaaaggcatgttgcccaagcaagactcgcccatctatcctatctatcctgacccttgtcccctgggtcctaatgcttgccagacaaacttcctctcacctatcttctccaaggttagtcctgcttctaaaaatcactacctgtctctggtgcttttctagtttctcctataagaatgacttctagtataaactctgttaccttctttaggcacccaggctcaccaatcagaaagacataatttttgcccaaagccccatcatagtgggactacctggaaatttaggatcccttctcagacaaacaggcctaacaaaatctattcctgaagctaggatatggggagcctcagaaattgtatccttcctgttcatataagtgagggcaaaaggtgtcactcttccaaccctggagatcccttccctccctcagggtatggccctccacttcatttttggggcataacatctttataggacatgggtaaggtcccaatactaacaggagaatgcttgggactctaacatgtttttgagaatgcgtcagtaagggccactaaatcctatttttctcagtcctccttgtggtctaggaggacagggaagggtgcaggttttcgagaatgcataggtaagggccactaaatccaaccttcctcggtcctccatgtggtctgggaggaaagctagtgtttctgctgccgcgtcagtgagcacaactattctgatcagcagggttcagggaccgttgcaggttcttgggcagggggagaaacaaaaaccaaaaccacgggcggttttgtctttcagatgggaaacactcaggcatcaacaggctcacccttgaaatgcatcctaagccattgggaccaatttgacccacaaaccctgaaaaagaggcggcttatttttttctgcactacggcttggccccaatagcctctccctgatggggaaaaatggccacctaagggaagtacgaattacgatactatcctgcagcttgaccttttctgtaagagggaaggcaaatggagtggaataccttatgtccaagctttcttttcattgagggagaatacacaactatgcaaagcttgcaatttacatcccacaggaggacctctcagcttacccccatatcctagcctccctatagctccccttcctatgaatgataatcctccgctaatctcccctgcccagaaggaaataagcaaagaaatctccaaaggaccacaaaaacccctgggctatcagttatgtccccttcaagctgtagggggaggggaatttggcccaacctgggtacatgtccctttctccctctctgacttaaagcagatcaaggcagacctggggaagtttcagatgatcctgataggtacatatatgtcctacaatgtctagggcaaaccttcgacctcgcttggagagatgtcatgctgctgttagatcaaaccctggcctttaatgaaaagaatgtggctttagctgcagcccaagagtttggagatacttggtatcttagtcaagtaaatgatagaatgacagccgaagaaagggacaaattccctactggtcagcaagccatccccagtatggatccccactgggaccttgactcagatcatggggactggagtcataaacatctgttgacctgtgctctagaaggactaagaagaattaggaaaaaagcccatgaattattcaatgatgtccaccgtaactcagggaaaggaataaaatccttctgccttcctcaagcagctacgggaggccttaagaaaatattctcccctgtcactctaatcactcgagggtcaactgattcaaaaagataagtttattacccaatcagctgcagatatcaggagaaagctccaaaagcaagccctgggccctgaacaaaatttggaggcagtattaaacctggcaacctcagtgttctataatagggaccaagaggaacaggcccgaaaggaaaagcaagatcagagaaaggccgcagccttagtcatggccctcagacaaacaaaccttggtggctcagagaggacagaaaatggagcaggccaataacccggtagggctttttatcagtgtggtttactaggacactttaaaaaagattgtccaatgagaaacaagctgccccctcgtccatgtccactatgccgaggcaatcactggaaggtgcactgccccagaggatgaaggttatctgggtcagaagcccccaaccagatgatctaacagcaggactgagggtgcccggggcaagcaccagctcatgtcatcaccctcactgagccccgggtacgtttaaccattgagggccaggaaattgacttcctcctggacactggcgtggccttctcagtgttaatcgttaatctcctgtcctggatgactgtcctcaaggtccattaccatctgaggaatcctgggacagcctgtaaccaggtagttctcccacctcctcagtcgtaattgggagactttgctcttttcacatgcctttcttgttatgcctgaaagtcccacacccttattagggagggatatattgtccaaggctggagctattatctacatgaatatggggaacaagttacccatttgttgtcccctacttgaggagggaatcaaccctgaagtctgggcactggaaggacaacttggaagggcaaaaaaatgcctgcccagtccaaatcaggttaaaagatcccaccacttttccttatcaaagacaatatcccttaaggcctgaagcccataaaggattacagaatattgttaaacgtttaaaggctcaaggcttagtaaggaaatgcagcagtccctgcaacaccccaattctaggagtacaaaaactgaaaggtcagtggagactagtgcaagatcttagacccatcaatgaggcagtaattcctctatatccagttgtacccaacccctataccctgctctctcaaataccagaggaagcagaatggttcatggttctggacctcaaggatgccttcttctgtattcccctgcactctgactcccagtttctctttgcctttgaggatcccacagaccacacatcccaacttacatggacggtattgccccatgggtttagggatagccctcatctgcttggtcaggcactggcccaagatctaggccatctctcaagtccaggcactctggtccttcaatatgtggatgatttacttttggctaccagttcggaagcctcatgccagcaggctactctagatctcttgaactttctagctaatcaagggtacaaggtgtctaggtcgaaggcccagccttgcctacagcaggtcaaatatctaggcctaatcttagccagaggcaccagggccctcagcaaggaaccaatacagcctatactggcttatcttcaccctaagacattaaaacaattaagggagttccttggaattaccggcttttgctgactatggatccccagatacagcaagatagccaggtccctctatactctaatcaaggaaacccagaaggcaaatactcatctagtagaatgggaaccagaggcagaaacatccttcaaaaccttaaagcaggccctagcacaagctccagctttaagccttccaacaggacaaaatttctctttatacgtcacagagcagggatagctcttggagtccttactcagactcgtgggacaaccccacaaccagtggcatacctaagtaaggaaattgatgtagtagcaaaaggctggcctcactgtttaacggtagttgcagcagtggccatcttagtgtcagaggccatcaaaataatacaaggaaaagatctcactgtatggactactcatgatgtaaatggcatactatgtgccaaaggaagtttatggctatcagacaactgcctacttagataccaggagctactccttgagggactggtgcttcaaatatgcacatgcgtggccctcaaccctgccacttttctcccagaggatggggaaccaatcgagcatgacttttatggtccagacttatgccacccgagatgatcccttagaagtccccttagctaatcctgaccttaacctatataccaatggaagttcatttgtggagaatgggatatgaagggcaggttacgccatagtgaggtaaccatacttgaaagtaagcctcttcccccagggaccagggcccagttagcagaactagtggcacttacctgagccttagaactgggaaaggggaaaaagaataaatgtgtgcggacttggagaaactttacgtctagctaagggattgtagatacaccaatcagcactctgtgtctagctcaaggtttgtaaatgcaccaatcagcactctgtgtctaactcaaggtttgtgaatgcaccaatcagcactctgtatctggctaatctggaggggacttggagaagctttatgtctagctaagggattgtaaatacaccaaccagcactctgtgtctagctcaaggtttgtaaatacaccaatcagtgcttttcgtctagctaatctagtggggagttggagaacttctgtgtctagctcagggattgtaaacacaccaatcagcaccctgtcaaaacagaccaatcagccctctgtaaaacagcccaatcagctctctgtgaaatggaccaatcagcaggatgtgggtggggccagataaaggaataaaagcaggctgtccaagcagcactggtaacccgctggggtccccttccacactgtggaagctttgttctttcactatttgcaataaatcttgctgcttctcactctttgggtctgcaccgcctttatgagctgtaacactcactgcgaaggtctgcagcttcactcctgaggccagcgagaccatgaacccaccgggaggaatgaacgactctggacgggaggaaaaaacaactccagatgcaccaccttaagagctgtaacactcaccgcgaaggtctgcagcttcactcctgaagccagcgagaccacgaacccaccagaaggaagaaactccaaacacatccgaacatcagaaggaacaaactccggacatgctgcctttaagaattgtaacacttaccgtgagggtctgcagcttcgttctttaagtcagtgagaccaagaacccaccaatttcgcatacactgggaccacaagtgcacaccaccaaccaggttaatttttaaatgttttgtagagatagggtcttgccacgttgcccaggctggtctggaacttctgggttcaaacaatccactcacctctacct[177 bp omitted]caccacgtcaggctaattttttgtatttttagtagagacagagtttcaccatgttagccaggatggtttcgatctcctgacctcgtaaatgtccctattcttgatctaaatctttagggaaatgagtcatgaaagttgagcccctaccatgtaatattttctcctctttgcttgtgttgaacatccccacaggctccctggagcagctcctgctcctggcaccccaggcttctgccctggagccacactgacccatggagcccctcatcctgctgcctctggttcatctctgctgggatgccaaagtgcccctcggctctctgtcttgtcattcctcacccgtgtcctcttctggaccatcgcggcaaggaccagtgagtctttcctgaggtgggtgcagtgaccaggatggccaaagaagccgcagggaggtgcgcccccagggcatggctggtggaatcctgttgtgttagcgcccttggcagcctgagtgtgaggagagcatggcagcagccagagacccgcgttctgggtctgactcttcccctctgtgggcctcagtttttccatctgtaaagtggagggaggtggcttggaacccctggatggttgctaggcaaccttcctgcaccaacatcctggggacctttctgattgatgctgagggaagggaactgtcttgaactccctttggcagaagaaactggcccagcagcttaggcaatggagcaagatgactccagggcccttcctcagacctgactgagaaaacagagcccactaggcaccagcttatggaggagactcacccctgggagaaagcagggcttcaaatcaggctgcccacgagctgcctgcggtgatgagggacatggagacccctctgggcctctggagggccctcatggagacccctccagaggcccagagcccaggtgacaggcagcagcctcctggagtatgtttctgcccatctctggaaaaacccaggtaggcactggtgggaagagagaacatgcatcctcctgccctccgtagctgcaggccctggcaacaagcctggaggctcagccatcctccttgctcagggggactctcctgccctagttctcagccctgcctctccaccagctcctaattctgggctgagctaggagagcaggtaaaggcctagggatccctgcaaagatgcacagcatggggtctcgaagacactccagagaataggacccagtcctcacaagcgcagagcagaccccctcccgcccccacccccacccttccactcttcactctatccccaaagcattaaaggacaagacaggtacgatactgatagagaacattctctacaaaagtggcaatgagcctgcaggagggattcggggtacagtggtgggagcacagagcctgctccaccccagcaccagaagaaccaggaggggctgcggcagtaaacggacgaggaacaggagagaaggggcagcacctggggctctgggagaaacaagtcggcacttgggggtggccccaggctcaggcccagagaacagggagaagagctgtggtgggctccagatggcggtggcaggcagccaagccctcagtgtcctgcagtaggacagggaccatctcctccatgccccctactctgggcacatgtgtgggaatgggaacccccagacagaccagaaagaggcctttgagggctctctttcccctgccccagccatgggggccccaggagatgctgggggctgaggccatgctcccagcaggagctgcttcccaagctgaggtcagggatggggggccatggctgagaaaggaggagagcacctctgcatggggtgcaaaggggcgcacacgtgtcagcgggctcatcagggactctcccacatctgtgacctcagtctggctggagagctttgggggcatacgtcagaggacacatgctgtgaccaccctctgagctggcctttcccctggtctcaccaccatcagagggctgggacacaggtgagctctcttacccccgatccacgcagaatcacgcaacagcccagtccctaccagacctggagggaaacctaccaaacaccacccaacgtgagtgtgcacacacgcacacatgcacacacacacacatgcatgcacacacacacatgcacacacatgcatgcacacacacaaacacgcacgcgttcacgtgcacacacacgcacacatgtatgcaagaacacacacacccaagcacacacccgtgctcacacataccacatacttacacacacatgcatgcacacacgcatacatgcacacaaacatgcacacgcacacagccctggtgacctggggacaatctgcagtttagaggatccactttctccagtgtccacatcgcaggacttacccaccccaggcctgacacccagccacaccctgttctgcctgtcccaggcctgggagactgaggaggttggcggacacctttctctagcccagcgcatgcctgccaggcctgggggctataatactgcagcccattggtctagcaccttgcatctagcgccctggccctctggggtccctggggggccaggctgcacaacgaaaaagggggaggttggaggaagacaggccaggctccacccctggatgagctgggaagggcgtcagtacccccaccccaccccaacccggctttccagctccgggccttgaccactaggtgaaggagggggagctggctatgcttgggatggggtacagactgaaagttggggcatttggctgaagagtctggctgaggaacttcccctctggggtggacgggaggaggggaggcagcccaaactcttcccttcacaacaatgcaggaagtgagcaagtctctggcctgagcacaagagaacaagaccatcaggggaggggtgggagaggccacggcgcccgggacaggtgcaccctcccgcatccacctcccacactctcatccagttccgatgcccctgccctccctctggggcaggcctcccccaagtctacatgtcctttacggctgctcagaatgggtggctcagggccttcaagacccctcagaactggagttccggaacattctcttgcccctctggtgcctccaggccacaccctcagcttcaaggtgcagacagactttcaaaggagtcgccccaactggtccttgctcctggggaagggggctgcagggctggcaactgtgaggacctcgagaccccaccataggttgtggcaacttgcaattcattttggtctggggagaggagcccccggttatctgtggaggaagagacagaaagaaacagatctcacatgaggccctccagaggcatcattttcacccagggcagccatctggacaacttagcctccccatctctcggcaggccaattgtcagggatgggggacgccagcctatgggtgacctccccatccccaaaactctgaaccagcctgcctccccacacccatccctgccccagccattcaggataacggccatagatacctaagaggaaatgaggacaaagtttgttgggcctgtgggatgccattggggaggggccagggcaggggctggccacagcatgaccattgtggtggcagccttgggcaactatgacggcctttggaacatgaactctgcctccagggctgctgctgaccctcttgggagcatttgcccacgttcc[140 bp omitted]atggcaaaaccccatctctactaaaaatacagaaattagctgggcatggtggtgcactcctgtaatcccagctactcaggaggctgaggcaggagaatcgcttgaacccgggaggtggaggttacagtgattgtgccactgcactccagcctggatgacaagagggaaactgtctcaaaaaaaaaaaaaaaaaaatctgcctgaggtcttgggcaattgagaggccctgctgactgcacgccctgcatcccatggcagccaccttgaccccaggctctaaagccatgcagaccagggatcaagcctagctccatgctgagcagcagcaggaccttgaggtgagctattctaactgtctgagcctccacttgctcattggctgtaaaatgggaacgatataatccaccaatatagtccagcgcacacaggcttttagagggattaagcaagaggacttgttcaagggcacaacccagcacctaggaggtgggagggctcaaaaacaccccagctgtgattcctgtgactgttgaaattcattgacattaagaggcccatttccccacttgtcgatgtccccagaatcgaggtgcactttcactgtgataagaatgcctcgggtcatcattaaattggccacttctttttctgagctggtggtaaataaaataagggtgccttttatcatcgatggcctcatttcgattttatgaaatacagtatcccccaccccctactcctgaataggcagatctgtaccccctccccaggggccttccaactcctgctcctccatcccccccgccaggctggacactcacagctctgtgtcctccagggccggcgggcgctccatcgcctgccgccgcctcctcacggcccccaagatcttctttcggggccccagtgggacgctgatgctgcggaggtcgaggtcagagcacagcatcaaagcctcgaggtcgatcttctcctgccgcaggagggcggcaaagtcctccatgtgcagagaggccaggaaggtctccagcgggctagtctcgggctccaggtcctcgtccaagcctaaatcgagctcatcccagggcagctcctccccacagctgcggtcctgcaggctgttggcactgcccaggctgtcatcgtccaggctgggggagctctgcagccgaccccgcggcgctcccaccccatccagacccccatcctcgcggcccagtccgtgcagcccactgctcaagtaatttctgcggaacaccatggtgcccaggccggggcgggtaaacagggagtcgtggcctgagtcggtgctgacctccgagtgggcaggctcggccgccagcgtggcacgggagacgctgtcctcgtccgagaggaacatgtcccggagcggggctcggccccactccttgggattggcgtaggtgccctggcgcacgaacatcacgtcgctgcccagctgcaggcccgagagcgagcgggcgctcttgcgcccatcctcggagaccttgaaggtgccttcgccgccctgcttgcgccgctccagcttcttctgcatcttggtcttgcccctggccgtgccgtgcagcgtggcctgagagtacggcaggtggctgcccagcgccagatgctgcagccggcggctcagggtgctggacgtgaggctggagaagctgagggtgtcggaacgctcggccagctcgcgccggtatcgccgctccatgcgttcgtggtgcctccgctgcagcttggcgcactcgcggatgcgccgctccgcctcgcggaaggccttgtccttcagcttacccaccagcttggggttgaggctgctctgcttggccgcgatggagtccaggtagcgcacgcattccatgtggcccttcatggcagccatgtccagcggcgtgtggtagtcgttgtctaggcaccagatgttggctccgaaggacaccaggaaggacaggcagtgcaagtggccattggaagctgccagatgcaggggtgtgttgccccagatgtcacacttgtccgggtcacccctgcagggaaagcattcaggagggacgagtgacgagtcctggctggggatggaggtggagggagtggaggggggaggggagcttccccactgtcacagcaacccccaaagggaccgtgggcctgagatctctcccactccaggagacctgcaggcctgagccacccaacaggtgagcccaggggtgagcccaggggaaaatggcctcaggcatgcagggggtggggtgacagagaaggcgggactggggcggggccttccccaagctaactgagggctgggaatctcaggggatgaatatttgatgccctgagagaagggagtaaattattgatggggcccagcacagagctggcccagagcgctggtgggccagggccgcgtctgggtctctaggcaggcgtggtggtgagtgtggctgcgtgtgccgagtgaccgtaaaagagaacagaccagtgggtggtgtgtgccgggccccagccccgggtgagcgtgtgtgaagtgtgggcttgcatgtcagcaggcagggccctgtctgcagggagcagggccagccctggcaagcccgagtgtgagaggaggtgtcgggccttggcctgggcggggaggggagtgtgggggcagccaggactggaggggaggaggagggaaatcagctgcccgtgctccgaagccctcccttccctaggttgccccctctttggtatccctgcaaggctggctcacttgagcctgtccagggacccccgacagcccccacaagcacccttcacaccagacgggtgtcccccagggcaagctcccaagactcctccggagctctccctcccttgggggcccagcacagcacccctgccctgcactaatgaggccacaaggccaacccccagggctgggggaagaatcactcccttgtctcaacagctccccacacaccccttcctgggcctcccctcctggccgccaagtcctgcaggccagtgtgggaaggacctgccagcacccaacccacaacccatcaaacaccaatcctggtctctggaggagttggggcttggtgtacccaaggggagccctcttcccctcctctcatgagcctctctgaagggatggcagggacagtgtcactgtgtgccctcctggggtggggaagggccagccagccttggcctcacgggacatggttcagctgcccaggcttcaaggctgctcccacctgatgctgggcccaaggagcagcccaaggagagggcaagaaggaggggtctccagcacctactacatgttcaggcactggccagtacctggtaccggggccagctaagcccctggccctctctcccatgacctgagacttcatatcaaccttcctggggtgtcctgtccaggctgccctgatgcccagaccaacctgacttctctttataaagccactggggctgagggagttggtcacagtcatttgactttagccccaaggaacccatatcagtggctctggtcctggaggtggctcaactgccacctccaggccccttccctggcactgacacctgcactgtatgcccacccccccacccaggacaactccaaagggagggggagggaagagaagccccttcagggtgaccacatcacagcctccaccattgcttagctgtgcccggctgtgggggagggacttggagagagttaatggagtggctgaatcagtgacatttggcgccctggacagtgtccataaatccccaaaatgagcaggttgagggcaagcgctgtgtgacaccagcctgccggagaacgtgggtgctggctggcagagccctttggatcaaggctggagagtgggcagtggagacccctccctttctagcccccactgctggcccctcgagacttcctaaccttctctccgagtctcactatcccctcactcttgcttccagggggaccccagccaggggatctctcccaccttcccctcactctgcagcaaccccccataatcaggaacccccaaatcccggtttctcccctcctagccccagatccaggtcacaagtgttaacaagtgtcagatgcctccgcttgggtcccctcaacatgtgtctctcccacaaacgccagggtctaagggtccgcctgtctgcaggggaaggaggcagctcagaggagtggtggacgaggaagtttggggtggtctcaggggcctcaagggcactgggtggggcgtactcacccgcggctcacaatgagacgcagcgactcgaggttgccatggtaggcagcccagagagtgggggtcatgccatcctcgtcgggggcattcagctcctttcgggtggcctccttgaggagctccaggtagccatcccgggctgcccggtggtactggtcgttcatggcgcccgaagtggacggggcgggcgggggacacggagaaaggccccccgcaggggagggcggcggtattagggctgaggcatgaggttggaggacggggccgggcaggggccggggccgccagcccccgctgccgcagacggagggtgcggagcgccagagccgcgactaccaagacatctgaaacgctcacccgggggcgggggcggagggggcgggggacgaaatctcccgctgtccagggagccgcccccggtcttcccctgggtcctaaacaccctgcatgcacctcaatacacgagggtgacccacgcaaggccctgtcctcctcttcaaaagtgcccaccccggggccgcgcactgtgacgcccagtccggggacagtcagagatctgtcctcactagagcctggggcgctgtggctccgtatttctccacctgtcagtggaacgaaccgagagctggggaggggtgccggagggcggggtgggggagccgtcctgagccccaggacagtggacctaagaaggggcaccgtgaccgaccgcggttcggtcagcgagtgggacgggccaggccgccgccgcctgaacggagtccctcgaccgcactccagcagggggcgctggaggactggcagcggctccgcgtgccgcgtggaacttcgcacccaagccccggagtccaacggagcgcgggccggcggcgggggcgggcagggcggtgggatagaggaaaggggagcttggatcactgcgaggaccgtgggggagaggggaactggggttgccatcccaggcaggagcacaggagcacaggattcagggtgcgccgcggctggagggcgtcagggtgcccgcaggctttttggacgtctcttgagcttagctctcggggctctgggcgcctggaatgctgcgcgccagggcgcggtgggcaccaggggcggggtgccctctaggtgccgcagtgcggggccgcgcccgagcctggccgcaccggggtgacggagtggggtcgcctctcaaagggtaaatatgaatcttgccttatctggctccagcgggctcttccctaaattcaccttggagaaagatggatcatgtgagcgggactgagagctttatggagccaaactcccgcagctgtaaatcaccctgtcctcctgggtataaagcgcctgtccatctcggcgtgggagagaggagacgctcgccgtcccctgacccccagctcagcgccggctccaagcccagccaggtgggtgccccgggccggagggcagtcggacttggggagtggggaccttggaggggtccaaccgggtgctgccgcttctcctttcttcccatccagcgagaggggcaggttccgcattttctcttcccctttcccagcgcttcctccagcacccgaagccccaaccctgcgggtcaggaactccctagtccccaagtctagggatgagatgggggaaggagagccgtcagggttgacctggagttttgtccgctcctcccctacagtgatccctctagccttctccagtcgcctccgccatgtccgaggagctggcccagggccccaaggagagccccccggcgccgcgtgcgggccccagggaggtgtggaagaagggtggccgcctgctgtcggtgctgctggcggtgaacgtgctgctcctcgcctgcacgctcatcagcggcggagccttcaacaaggtggccgtgtacgacaccgacgtgttcgcgctgctcactgcgatgatgctgctggcaacgctctggatcctcttctacctcctccgaaccgtgcgctgcccctgcgcggtaccctaccgggacgcgcacgctggccccatctggctccgaggtgccaggggaggtgggggcgaggtagggtgggcacaacagggagctgcaggctagggctctcgcaggagttgcagagtgcagattgacatacgagggcgagaggctccctagggaggaccaggaggaccggagggtgaagtgggctgcagttagggaaaaagaggaaggtaaggggtcctgggggagggatgaatagagggatggaaggggacctctttgcccccggtctgaagattagagaaggctggctgagggagggcctttgatggagagcaggaaccagaagatggcagccactgaaagagctcagccagggccctttgcggtatccacacagccccaaagagaggggggcttggtagcaggtccatccatccacccactcagtcatacactcacccttccatccacccattcacctttcagtctgtctatccacctatccacctgtcctcccaccctccccattgatccatccaacagtgcactcactcacccatccacccacccatctagcctcccatcctcagggcctgtcctcagctcggcaggccttctctcctgcctctttgatccaccaccaccacccacccacccctggtttccaggtgggctggtgctgtttggaatctgcaccctcatcatggatgtcttcaagaccggctactactccagtttctttgagtgccagtcagccatcaagatcctgcaccccctcatccaggctgtgtttgtcatcatccaggtgggtggaggagtgtcgctgtgtggaagaaaggagctaacacttggccattgggaaggacccaacaaggggtcggagacctgagctccatccgcctcgtatcctgagctattaagtaaaccagggacagggctgtagagagcatcacaggagtccatcaatgtggaaacgcctcataatgaagtaacatcccaacgtgagctcccacttggagctctgcaatgttatttcaacctaagcagtgccagtagttaacacctaggaggtgtgagttgtgccagccagccctgtctcctagaacctggcctgcccttcttgggtgcccgtagggggcttctgtgtcagcccaggctcctgccagcttggtccctctgtgctgtatttgtttggaaagtagggtagcctgtaactgggatttctcaaacattcactttgtagttgttgttgcataaacaatactttgaaagatcttctgattgagctgagacaggactgggcttagatgggatcagaacagcccccagccctctatcatgaccaaaatggcaccatggatgatgccctccccagaaacatcactcctgctgcccaggttttcacagttcagcacacatgtggctgtggcatttatgtagttttagtctttcgtattttatgggtttgaagaatactcaggtaaaatgaaaatatagatatccccacatcaccaaatgccatagcagggattcacaggcagccagatggtagcaaggcctggtacggtgacagaggaagaggatgagcaggggatgttgtcaaatgaaggtgagaagtccacagagactccttccaccctgagcaagacctaacctgaggctggccttgctcccagaaaaaaaaaaaaactagatagtcaaaaatctacttgacccccatctccacacaaagtaaaccccaccacgagcagggttttacatgtgacgttttgcaaacctttaaagaatggagaaccactattttatacaaactgtgtcagaatagaaaaagacagtgctccccacctaatttttttttcttttttcttttcttttccttttttttttttcgagatggagtctcactctatcgcccaggctggagtgcagtggcacgatctcggctgcaacctctgcctcctgggttcaagcgattctcctgcctcagcctcccaagtagctgggattacaggtgcatgccaccatgcccagataattttttgtgcgtttttagtacagatggggtttaatagagatggggttttaccatg[136 bp omitted]cagtgtaagggttcctcaggcggagagaacaagatggcatggacttgggtgcgctggagttttgtccatctatggagtaaatgactctcaccaatgtctctccatacagacctactttctctgggtctctgctaaagactgcgttcacgtccacctggatctgacctggtgagaactgcagctcgatgcctgtacccagcgtgctggtgttcaccttgcaggagagattcaggctttccaccctggggcagggcctctctttatgtcccctgggtggggttgcagccaagccctccttgctttgtcaggctgacttccactaccttgtggggccctttctcccaggggagggagtggtggtggcccccgggaaaacctcctagccctctctttggtggcataccagccaggctgtgttcctaccaaaatcagcttccctgttcacacagggcctggctgctttatcatttctcaacaccagctctcagtattgctccccaacctgccaaagggtcacaggcctctttgtccccacccctgaccccaaacaggtgtggtctcatgttcacactcaccaccaacctggccatctggatggcggccgtggtggatgaatctgtgcaccaatcccactcctacagcagttctcacagcaacgccagccacgcccgtctcatctctgaccgtgagtttcctcttaatgctggccctgtggctaccaggccttgggccgggtgctttgtgaatttataacgtcagtctcctgtgccctcatgagggcatagaggcaaaggacagagccagggtcctcctcctgttgcaggatctacctctgcagtataggtgtaggtgaccccagaagggaagtatcaggggtacccttttatccttgaggctgcagcccaggcccccctgtccagtctccatcccaccaagaagggacccaggaccaggtgcagtggctcatgcttgtaatcctagcactttggaaggctaaggcagaccaattgcttgagctcaggagttcaagaccaccctaggccaaatgatgaaaccccgtctctacaaaaaatacaaaaaaatagcccattgtggtggtgcatgcctgtggtcccagctactatgggaggctgaggagggaggattgcttgagcctgggaggtcgagactgcagtgagctgtgattgcaccattgcactccaacctcggtgacagagtgagaccctgtttcaaaaattaaaaaaaaagagacccagacccagaatccaggaagaaagggcaagagtgatcaagctgggaaaaggagaagggaggcagagtggttctgtggtgcaagcatggatcagatgggagagcccgggaaggaggagaaggtgagaaataatcatggcatcacaatggtaagggtggcaatttactgaggtctgtatgtcaggcactgtgctgagtgtcttaaacactccatttaaccctcaacacttccctgtgaaataggtactctccccattcccatgcataggtgcagaaactaaggcagagagagcttaagtagctcacccaagatctagcactagcattcatatgcatctttgtttttaaacaatatgctaaactaaggaggaacgggatccagtctccagtcctcattctctggacttctctagggtcccccaatagccaggaccagacaagataactaagacatgcacgctcctagcatgggagggtccggcaacagaaagcatggcccctgccctcagggagaccccagcccagcaagccttacaaagaaccaccctgcacagagaggactcctgagggtgcaaaaccaaaccagggaggtgatggacttcacatgggggcctgcaggctggagagaggcctgtcagagaagtacctgtcccggggtcagaagtcaggcagttggcgttgactctgcccttacaagtcacatcaccacgttaagcctcagtttcttcatctgcaaaaccagctgggctagttcttaggatgaaaagagacgtttgccaaggcccagagtatcctacaaacacattctggaatcaagtcaagactcctttccatgtggtacaaacagaagtaacgggaggtcatggtggagacttgggcacagcagctggctttctgggctgaatcagatggtagggagagctgtgaggaagcctgaactttagaggttcccaagagagccactttctatctcagggagccagggcagaaagggatggaaggaatggagtggggtgaagtgagcagtcctgtggttcaaactgttttgtttttttgtttgtttgtttgtttgtttgtttgagacagagtcttgctctgtcacccaggctggagtgcagtggcgcgatctcggctcactgcaacctctgcctcctgggttcaagcaattctcctgcctcaacctcccgtgtagctgggactacaggtgcatgccaccaagcccagctaatttttgtatttttagtagagacaggatttcaccgtgttggccaggctggcctcaaactcctgacctcaggtgatccacccaccttggcctcccaaagtgttgggattacaggtgtgagccactgcacctggcctggactgttcttactgagcactgatgtgtcccagtctctggcacacagtaggtgctcaagaaatatttgtgaagtgaaggagtgtgccacgccctgtaaaggcatgagggataccgtggtgaatatagcagtcatgacagacagggagcctgcccttaacaaaggtcacaagctaggctgggcgtggtggctcacgcctgtaatcccagcattttgggaggccgaggcaagcagatcacctgaggtcaggagttcaagaccagcctggccaacatggcgaaaccctgtctctactaaaaatataaaaattagccaggtgtgatgacaggtgcctgtaatcccagctacttgggaggctgaggcaggagaatggcttgaatccgggaggtgaagcttgcagtgagccaagatcacaccattgcactccagcctgagcatcaagagtgaaactccgtctcaaaacaaaacaaaaaaaaaaaggtcacaggctaggggtgagacctctctaggaaggcaggagggctgtccagccctgtgtctctctccacaacagagcatgcagacaacccggtcggaggagactcctgcctctgcagcacggccgtctgccagatcttccagcaggggtacttctacctatatcccttcaacatcgagtacagcctcttcgcctccaccatgctgtatgtcatgtggaagaatgtgggtagattcctggcctccacccctggccacagccacaccccaacccctgtcagcctcttccgggagaccttttttgctggcccggttctgggcctgctgctcttcgtggtggggctggctgtcttcatcatctacgaggttcaagtgagcggggacgggagccgcaccaggcaggccctggtcatctactacagcttcaacattgtctgcttgggactcaccaccttggtcagcctgagcggctccatcatctaccgttttgaccgccgggccatggaccaccataagaaccccacgcgcactctggacgtggccctgctgatgggtgccgccctgggtcagtacgccatctcttactactccatcgtggctgtggtggcgggcacaccccaggacctgctggcagggctcaacctcacccatgcactgctcatgatcgcccagcacaccttccagaacatgtttatcatcgagagccttcaccgaggaccgcccggggctgagcctcacagtacccaccccaaggagccctgccaagacctcaccttcaccaacctggatgccctccacacgttgtccgcctgcccacccaaccccgggctggttagccccagcccttcagaccagcgggaagcagtggccatcgtctcaacccccagaagccagtggagacgccagtgcctaaaagacatttctctgtttctcctactctgcaatgtcattgtgagtagctggggggagaaagggtgggcttgggagaagagactgaggaaggatgctcttgcaggcttaagcccttagccttctctgtcttgcccccagcccgcctgagaatcttacagctctctaggaaaggagcaggttcagagggggccagctgtagctttggggcaaatggcatctcagggcacacagagaaaatgaaatcctagcgttctggcatctaagcagcagatggagctggaagggtcccagggaaggttgacacaggggctgggcagaggtgagagggagctgagagctgatgtggaaggcggggtcctcaccccccagtgggaggtgtgactgctcctgggaacttgtgatctgcctgcttctcagaataattggaacagtgtcaggaagtagcggagaccagtgttaagtgtgagcggtctgttagcagagtgaactgggaaggagggcatctacaacagccacccc[142 bp omitted]aaccctgtctccactaaaaatacaaaaattagccaggcgtggtagtgtgcgcaccctataatctcagctacttgggaggttgaggcaagggaattgtttgaacccaggaggcggaggttgcagtgagctgagattgcaccattgcactccagcctgtgcaacagagtgacactctgtcaaaaaaaaaaaaaaaaaaaaagcaatagacttcacccaatacaaatatattctctgtatagaagtaccccagggcagaaacactggtaatgaaagtgcataccaataggaaaacactcctggtgtttctagtacaacccaagacagaaatggcccagtgggggcttattattacctctgatatagaaacatgtacctatgtgggtacatctcaaagagaaaaaaacaattctaatgaagtttcactcaatagaaaaacaatccttccagctagaacctccaatagaaaaatatccctaatatagaaaattacttaatgtgggtatatcccaggacagagcaagagccccagagtgaattctaccccatgaaatcctacctgcatgaggtacaccagtggccctaactaagagtcattcttagtgaggtcccactgtgaagggccatccaccaggtcatggtccccatagatgtgggatgatgccacgcaggagccttccaacacaatcaatttcacttaaaaaaaatgtggtcatcaatctctgaccctaccagcagaatcattaaggtccagacctcagcatgtcttggaacgtctttggtacctggccccctgccctctggccccacctccaccttccacccaggcctggcttataggctaggggccaccttctgggaggctattcttgctccaggcatctgagcctaaatcacctccagtagcatcttctccatctccttcattttataggacagaacaggcttagaggggactgcaatgtgcccaaggatgaagttaatcaggggtaggggtggagctagcctagaaacctttgttctttgcttcttacccacacctgaatcttctgagctcctagccagagaggaagcaggattccaacttccacttcctcccactcctggaaagggagaaggggatgaggggagagctggagggcagagctcaaggagggctggggtggggtggccttctgtctgaaccccaaacccctgccttgagcctatctgattctgccacccccacccctgtgcacaaaaccccccaggacagagctgctgatttcactgtttgtacctcttcttctagagaaacctcttctcccctccccaatcccacattgaggccctgctaagattttgggagaggtgatcacaggtgtccatgaggtgggctagcctagggatggcgaattcagttgggctcacttcctgagccccttagagtgtgctaggtcctgtccaaaatgctagagctgcccattcactgacacccagccctccgtgtccaccaagctagaaggatgggccgccatctagccacggcccagcaaaacccacagaaatgacccacaggcatccatccaggccagctcctgaaatgctcctctctccacacagctgtggatcatgcctgccttcggggcccgccctcatttcagcaacacagtggaggtggatttctacggctactccctctgggcggtcatcgtcaacatctgcctccctttcggcatcttctaccgcatgcacgctgtgtccagcctgctggaggtctacgtgctgtcctgaggcctccaacagaggcatggggggcaggaagagggggctcagctcatgtgcccactcagacaccctctgggaatgaatcccagctggtgccatatgacagcccatttccttctggtcccagagtggaattttcacaaaagttatttttccaggttcaatttttaaatcacagtcaggacaggcccatccaccccagtatgaccgtggggcatgaggtgactggggaagggagacctctcctggcagcatttctaggacccaacaagatctggaggtgccggctctggttccatctctaatcccctgctgtggcctggccagtgtactgcccggagctggaaaccaataaacctgtgatttgcccccatccccactgtttgtctctgttgtcccgtctgaggtggtcacaggagaggatcttgggagtcagagcgggaagggcccctggagattttcaggtctcaagttttgcagtgtgtgagcaaaatccaaatgacagactagctacagggtgggtaactggagttcccaaactgccatcttcctcttccctttatctccaggtggcatatacatataatctttttttttttttttttttgagagagtgtctcacctttttgcccaggctggagtgcagatagatcactgcaaccttaacctcctggactcaagagacccccccacttcagcctcctgagtagctggaactacagctactactgccaccacgcctggctaaattgtgtgtgtgtgtgtgtgtgtgtgtgtgtgtgtggagatgagggtctcattgtgttgcccagtctggtcttgaactcctgggctcaagtgatcctcccccctcagcctcccaaagtgctgggattacaggcatgagccacagcactcaacctaatcattttctttgtgtgtgtcccatgacagaagaaagtttaggaagcagtgacctagtctaatgtctgcattttacaaagaaggaagctgaggcccagagaggtaaagtgacttgcccaaggtcacacacctgcaaaaaatccagagcctttctgctaagaacaataattttcaaactttgttttcaagcagaacatttttcccttcaaataaaatattacaggaacacaagtttataacatagatataggctgtgtgcagtgcctcacgcttgtaatcccagcactttgggaggccgaggcaggcagatcacttgaggtcaggagttcgagaccagcctggccaacatggcgaaactctgtttctactaaaaaatacaaaaagtagccgggcatggtggcgtgcgcctgtaatcccagctactcaggaggctgaggcaggagaatcacttgaacccaggaggcaaaggttgcagtgagccgagatcatgccactgcactccagcctgtctaaaacaaaaacaaaaacaaacaaacaaaaaagatataaacaaggcagttctaatttaaaaggagttgggagtctcagatcctcaccacttgacttccccctgccccaggaggtccccgaggagtttcccctaagccctagggtttctactctacaaagggtatagagatgcttaggagggaagacagcagagagatgggaaggaggctccacagttagaagagtgaaaggtggtggtgagcatgcagaggcagagggaggggaagggctgggagagggagggctgggcgggacccatggagcagatggcatttgggggagatcatgggaacagcagcactgggagctcaggggactttgaggaaagtgtgcctggaccctgtcagcagaaggaggtgagtagttctcagaggccgcaggtggagctgaggaggcctcctcccctgtcagaatggggctgtgctccaactctccccaccaagttcaggtttgacttaagggaaacacagggtcctgctaggcggcctccaggcctggggctaggtagggtacaggaaaaagcgactccaggcctggagggagggcgtccattcccagcttgatcaccaaaggaaaacgaggcctgaattccgcaagctctttactgcggacctaagaacactgcacccctctccaccccatccgagggcgggctgcgagttggagaccctgcaggcccgcgcctgcacagccctcagccccgcccgcttgtccagctgcctcgcaattggctgcaccctctgggtccgagcccccgggagggtaattaacgagggattaatgagatttccaaagtcaacagaaaaatcgatgggccgcggagcccgagcggcggctgcgcagtcccgctgggggagggcgtcgcgggcatcggtctcacctggacggacgatccgctcagcgcccgcagtcggtggttagcccacggcgatgcctctcccggcctcaggtaagcccggagcgccggcggaactttcccagcttgcgcaccccagacactggcacatactacccacccccccaaaaggggggttcacaagtaggggctgcagggattggaacgggaaagcggggtgactgtggagaggtgaactccctttaatctgaggccggcccctccacccgccccgcaacccgcgctccgcgcccctactcctttccgtggacccggggagcacagagggcctcagggcgcgactcctcccggccgggtccacacagcagaaagcgcggaggcctggggtgtgaggttggttggggctgtctggacgcccggtctggggcacgcaggaagcggctgccccggccccgcagtccctaaaatggctcggaaggaaatcccgagggcgcccgcactcagcagcctcctcggagccggccctgcgctgctgggccgggcgccgggcccgacggctccgcggctttcatcgccaatccagccgagacccacaaaccagtccagtgtcccggccctcccttggactggcgtcgcgcccaggggcgtgccagggggcggcagagtactgcttgtcagttccaggtgcccttgccccagccttctgcccgagacccctaaatgcccactcctgccccctgcccagcccgggaccaaattcgctcctttgaaggctcacgccagcggcctttggagggctggacttcagggtgggagacgggggatactgtcagggcaaagaccccagaggaagggaacctggaaccttgtcccccagtgtcccctccaggcctccagtctgaataaaattcacccttgaaatttcaccagtaatcccgacccttcccagctctccaggacctcaaaagaactggaaggaaatgcagagatagccaacactgagttttccaggtgccaggcattgccggcattactctctgcccgtgcttcgtgcatgtattaaatcatgtcattctgacaaagcccctattcggcattcatcacccccccaccctttttttttttttttttttgagacagggtctaactctgtccctcaggctggagttcactgtggcgatcacagctcactgcagcctcagcctcccaggctgaagcaatcctcccacatcagcctcccgagtagctgggactacaggtgcatgccactacacctggctaattgtttggtattttttgtagagacagggttttgccatgttccccaggctggtctccaactcctgggctcaagggatccgctcacctcagcctcccaaagtgctggaattacaggcgtgagccactgcagccagcctcgttccggaagtctttattgagcatctactatgcaccagctactattccatagttgtatatcagttttgcagatgacaacactcaggcacagagtctaagtagctctctgtagtagtctcagtagtctaagatgacagaggtaataagtgctggaatctgagcacttgatcattaatctaccctgcttgggggctggaggagagggtgcaggttttggggaaggtgaagtagagcagttacagttgggatatatggagcagggagacatcccggtgagccccagccttgctcaatttgggtgggggagcttaggagggaaagataaagatcatcgggagtctcctccccagccagcccggaaagagtttaatgggaagggtctctgtccacagctctggtgctgaaaatttcccaaaagatgccagagtcagtgggcaatcactgggtgaatgtcacatctgcactaggtttggggggtccaagttaagcaggacccggtctctgtcctggaggagtttcaggacttaatgggagccagccacacccacagcacaccaaacagggcacacctctcaatagaggggagtggccccagcaaagtagcaccagaaggcttaggcagagaggaaggctttccaggtgggtggggaggatgggcgagtggtgggggaggcagaaagaagagcagtgtccaggagggatggcaggaggcaggagaccatgggagaaacgcagaactttctacctgggcctgggttggtgtgggaggcaggtgccttgagtacggcaggggtggtgggacagggaggagacagaacttaggcaaggatgacagagtggagtgggaaaggggagaaaatcatttatagaatcttgaaaagaggcttaagttttagtgctccatctgccccagaagagaacagcagaaggtataaatatggagcaggtggagaatgggagaatatgacaaggggagaatgggagcccggagaggttgcattttcaagccagatatggtgagagtcttctggtgttgcatagagggcacgtctgaagctcctgaagcctggggtctcaagggagagacagagcaaagcacagctaatggaagcagaggacgatgggtggtcagcgtggggtgaggtgggaatgctgacgagggaaggccgcagagaggaggcagggtctctgccgagtcctgaaggacaagctagagttacccaaggggcaaaaggggtaggcattaaaggcaaagaatagggtgtgggcaaagactgggggcgttccaggaagtgcagcaagatggtatagcccaaggagaggggagtagggtcaaagacaatgctagaggggtaagttgaagccagaccaggaagcagcagcagctactctgccttgggcagagaacctggaaccttgtccaggcccatactaatcatacacctctcattttgagaggccatgcaggctgtgtcagtaatttggactttatactgagggcaattagttgcctttgcaggactttaagtaggggagaggcactctgggcaagaagaccagtccaagagagcaaggaagggggcccagactaggtagtggttgaggtcaagaaaaatcagggccaggcatggtggcttacacctgtaatcccagcactttgggaacctgagacaggaggatcactcgaggcgaggagttcaagaccagcttaggcaacataacgtgaccctgtctctgcaaaaaaaaaaaaaattaaaattagccaagggtggtggcacatgcctgtagtcccaactactcatgaggctgaatcgggaggatcacttgagcccaggagttcaagattgcagtgagctatgatggtgccactgcactccaggctgggtgacagagcgagaccctagctctaaaaatagacaaataaaaatctaagagcaacttgtgagctggaatgaacaagcctggggcctaagagaatgcaagggatgaggggagaggcaaaaaggacacccagttctctgctaggaggtggggagatggagatgtcactctgagattgtgacattaggaagcaagagaatgggagcaatgagcacctagaaccctgagctcagagcacaagggcagcagcaggaccaaggaagagcctgggtggaacagggggtctctagggagccttctgggtcagctcagcctccccaccaggagagcacccagaagcagcagaaccatccccactctcaacagcacctcagtcccaccaggaagaaggagtgtccggtggggagagcatgctggactcagagctgcaggcattggatggcccaaaatctggtcttagcaagtggtgacaaagtggttggcctgtgtgaatgcttgggagaggtgaggaaatggcaggagacattcaggaaaagaggagggtaacgatcgtgtttcctacgttatgccaggcactcgtgggacttccgggagtggggggaggggcacagaaatagaagccagttccttcaaagtcaaccttcaaagtcaagggcgtggcagcgatgctgatccaggcctgtcccatgctctcagaagacattgtgaatcaaccccagaaacttttccctaaacctttaatgtactttaaaattattttatttatgtatttatgtttaaactcagggtcttgctctgtcactcagcttggagtgcagtggtccaatcatagctcactgcaaccttgatttcctgggctcaagccatcctcctgcctcagcctcctgagtagttgggactataggcattaaaccatcatacctggctaatatatatattatacacacacacacacacacacacacacacacacacacacacacacatacatatatacatatatggggtttttttcggcttttttgtttttttttttttttgaagagatggtgtcttcctatgttagccaggctggtcttgaatgcctgggctcaagcaatcctcccacctgaggctcccaaagtgctgagattacaggcatcagccaccatgctcagcctaaaattactcttaattacataagtactgtgctaatttttttttaaaaaactagaacagtaaagctaaaaagtctgctactcccaatcccagtactctcatcccagaagaaactcctattgtgaaactgatgggtataatctagaccagcagtccccagtccccaggctgcggaccagtaccagtccatggcctgttaggaaccaggccgcatagcaggaggtaagtgatggggagggagcatgacagcctgagctctgcctcctgtcagatcagcagtggcaacagattctcataggagcacaagccctatcgtgaactgcacatgtgagggatctaggggttgcccactcctcatgagaatctaatacccaatgatctgaagtggaacagtttcatcccgaaaccatccctccaccctccatccatggaaaaattgtcttccacgaaactgctccctggtgccaaaaaagttggggaggggactgctggtctagaccttttaaaagtaatcatataggtgcttgtatgttcccataatacagtattgtttcagatcacaccattcttccctaccaagcccagacacagcctcaggatgcttctctacaagacattttaggcaatcatttcccaaccaatcagggtcagaataagaaaggccaccaatttgccctccctggtgtcagaagtgaaagtcctaccagaaggcggaaggacaccgctgccttttcatggcaaaaagtcacagccctagaaactgaccaggcactaggcagacgctgactttaggatcaggcacaagtcaggaagtggggttgagagggaggacatgatcctcacgccagtcaaactaattccccatgtttatgtgcagcacgagaggtttccgtagggtctcctggtctgtttgaacctcctcaggtcctgtaagatagatggggcagctgctattagttccaatgtcccaaccacccaaccagagaggccgcatagctgaccctgggtcacacagcggttaggggcagcgtggacttgaacccaggacagcctggcagttaacccaggaccctttctccatctccagcccctgctgaggctacacccatgccttcttcagaagcacaggagactgaagcagccccggagaaggagaaccgagtggatgtgggggccgaggagagagcggccgccacccggccccggcagaagtcctggctggtgaggcatttctctctgctgctgcggcgggaccggcaggcccagaaggctggacaactcttctcggggctcctggccctgaatgtggtgttcctgggtggcgccttcatctgcagcatgatcttcaacaaggtggccgtcactctgggtgacgtgtggatcctgctggccacgctgaaggtcctctccctgctttggcttctctactatgtggcaagcaccacccgccgaccacacgccgtgctctaccaagatccccacgcggggcccctctgggtgcggggtgagtgtcaggttgctggggggctgggcaggggtggggagggagagccggttccgcgcaggtgccaacgcccgcccacatgtccggccaggttccctagtgctcttcggcagctgcaccttctgcctcaacatcttccgagtgggctacgatgtgagccacatccgctgcaagtcacagctggaccttgtcttctctgtcatcgagatggtcttcatcggcgtccaggtgacaggcttctcacgtccccacatcaccgaggacataccctatctacccatgccatgcacacacctcccactacctatgcctaggaacagccacacaggcaaatacctaatgtcccagggtctttgcacacacaccacacccctcacacaagtgtccacgtccacacatacccacgggttcctgcatcaacacacacaccgtgtcaccgaatgtagacacttagaagtccagctgtctatgcgtatgtaggcatatccctggatatacac[142 bp omitted]aaaaccctgtctctactgaaaatacaaaaattagccgggtgtggtggcgcacgcctgtagtcccagctactcgggaggctgaggcacaagaatcgcttgaacccaggaggcagaggttgcagtgagccaagatcatgccactgagctccagcctgggcgacagagtgag[131 bp omitted]taacacagtgaaaccctgtctctaccaaaaatacaaaaacaaaattagctgggcgtggtggcaggcgcctgtagtcccagctactcaggaggctgagg[139 bp omitted]tcttgtcaccaggcattgtgttgggtgcttcgttcccgcagtcttatttcccccaacaagaaagcacttccccaaagggtgggctttttggtcccttttcccagctgaggcaactaaggctcagagatggtttgccactgattcaataccacacagcaagaagcagtagagccaagattccgacccagtctttctccctgtgtctttcactgtaaatacacgcatgcgccccaggaactcacactgtggtcccaccacctccaccagcccctgggctcaaggccctgtctctttcagacctgggtgctctggaaacactgcaaagactgtgttcgggtccagaccaacttcactaggtaagacttctctccctcccaaaccctctggcctctctgtcctccccaccacttccctggtcagggtggccgcggggctataggttagtctgggatgtgtcctaggtggccccagggctgcctcttgtgtcctagtgccagtgtgacactagggagtgagtggttgggagtgagtggttgccccaacaacagtggatggtgagggtttggcacctggggagccggccagggtgtgtgagaagagtgtggcatttcccccaggtgtggcctgatgctgaccctggccacaaacctgctgctgtgggttctggccgttaccaatgactccatgcaccgagagatcgaagctgagcttggcatcctcatggaaaaatccacaggtatggaaaggagaccaggtcttccttgccctgaaacacacacacacacacacacacacacacacacacataaacgctacactctctaaaacaggtgaggctcagtaggtctatagagttgggagcaaactctagaggccagattaggaatcaacagaaaactgaagtttgccagtggtccccatcccaccccatcaggtgctgacgccctgcacccaactccaggtgtccagctagccatcagcaagccagccactgatcctggctgagagagccactaagtccttcaggtatgcaccccgcccgtggcatttgcattttacttgcaagcaactcaacagcctcccggctgaaaggaatatcttcctaacacaattttaggtgcctggcctcatcaatcaggtgggacggaagatatctggacagaaaaaaactcccaagattgtcccatatgcctcacctcctatcctagaggctgcatcccataccctacatgggaacactgctctgtgggattgagccacacctgtatgtacatgccccaccccgccccgggtggcatcaccatcacgccctgcagcccagccctcccagcacatccacacattcacatacccgctgcatcagtcacgacacgcctgtgtactgtgagcattctatatactctgcttgcatttctcagaaaagctgtgcaaagagagaatttttgccaagtgacatcatggattttgaaattataaaataattcagggctgggcacagtggctcacgcctataatcccagcgctttgggaggccgaggcaggcagatcacctgaggtcaggagtttgaaaccagcctagcgaacatggcgaaaccccgtctctactaaaaatacaaaaattacccaggcatggttgtgggtgcctgtaatcccagctactcaggaggctgaggcatgagaatcgcttgaacccgggaggcggaggttgcggtaagccgagatcgcaccattgcactccagcctgtgtgacaagagtgaaactgtcataaaacaaaataaaataagattcaagcattacaaatgagtagaagaacaagacatacccatcatctaggcataataattattaatatttggccatatttatttatttttaatttttgctgaagtacttaaattacagaaatcatgacattatatctcaaaatatttcagcatgcatctttttttcttctttctttctttttttttctttttgagacagggtgtcgctctgtcacccaggctggagtgcagtggtgaaatcatagctcactacagtttcaaacttctgggctcaagcgatcctcccacctcagcctcctgagtagctgggactacaggcacatgccagcacacccagctaatttttaaaatttttgtaaagatggagtctcacaaaaaaatttctgagcccagactcatctcaaactactgggttcaagtgatcctccctcctcagcttcccaaagtgctgggattataggcatgagccaccatgccggacccagtgtacatctctttagaaagagatgtattcccccacatgaccacaatgctattacaattgttaacaaaatcctttagcttcattctgtcctctaaatcaatctatatcccactttctccagttagccccagaaatgtcttttacagacggtttgttcaaacatgcaatgcatttggttaagtctaaattggtgttttcccactgaccttgagacttgtcaggttgcttcctcctggcagtgtttaactcacatccctctcccctacttttccttggaacgggaagtatagacaaaatcttgattagattcaggttagatattttcggccccagcttcttccaggtgatgctgtgtgctctgagggacagggatggcaaggtactaatgactgatgacctgaccctgagtgctgctaaggccgatggctgggttccgctgtcacagccacgggttttcccttgagcccaggaagtaatctgtggaggtgacatttgacaccagagacatcatgtgagggttcttggggtttcggtttttggtttatttgagacacactctcactctgtcacccaaagtggaatacagtcatgggaacacggctcactgcagcctcaaccttccaggctcaagtgatcctcccacctcagcctcccaaatagctgggactacagatgtgtgccatccggctaatgttttttgttagtttttgttttttgttttttgtggtttttttttttgagatggagttttgctctgtcgcccaggctggagtgcaatggcacaatcttggctcactgcaacctctgcctcccggtctcaagccattcttctgcctc[134 bp omitted]cagcctcccaaagtgttgggattacaggcatgaaccaccgcacctggccatgttttttatttttagtagagacgaggtctcaccatgttacccaagtcgatcttgaactcctgagctcaagcagtcttcctgccttggcctctcaaagtgctgggattacaggcatgagccactgcgcctggctggcatcatgtttttaatgctttacgtaagtttggcatctgaagtcttcaattcctttgaaaaagaatgaccattctgtgggatttgtgatctctttgcctgggcctcagtttccacattggtaaaatgagcggctgggtcgctttcagctctagtgtattccagggaatgggaggtatctgtgtagccagtttcctcagagcagagcctgcctgaatgtctgtccctcccaccctgcctccctcccaggcaatgagaccaacacctgtctgtgcctcaatgccaccgcgtgtgaagctttccggagaggcttcctgatgctctaccccttcagcactgagtactgcctcatctgctgtgctgtgctgtttgtcatgtggaagaacgtgggccgccacgtggcaccccacatgggtgcccaccctgccaccgcacccttccacctgcacggggccatcttcgggccgctgctgggcctgctggtgctgctggcaggtgtgtgcgtctttgtgctcttccaaatcgaggccagtggccctgccattgcttgccagtacttcaccctctactatgccttctatgtggctgtgctgcccaccatgagtctggcgtgcctggcgggcacagccatacacgggctggaggagagagagctggacacggtcaagaaccctacccgcagcctggatgtggtgctgctaatgggtgctgcactgggccagatgggcatcgcctatttctccatcgtggccattgtggccaagcgcccgcatgagctgctcaaccgcctcatcctggcctactcgctgctgctcatcctgcagcacatcgctcagaacctcttcatcatcgagggcctgcaccggcgcccactctgggagacagttcccgagggcctggcaggaaagcaggaggctgagcctccccgcagaggctccttgctggagctgggccagggcctgcagcgggcctcactggcctacatccactcctacagccacctcaactggaagcggagggcactcaaggagatctcactcttcctcatcctctgcaatatcacagtaagtggctgggctaaggggcctggagggtagaggtggccaggcagacccagaaagcctcactcaggaagggatggatcaaggacacatctttttccaactagcttgatgctgcttgagagtgtccccccagttccctacagggtgcctggcacaaatgaatgtgccaagcacttggctaagtgctcttcacaaacaaatatgtaagacatccaccctccagaaacttcctgtctagttgggaagacaccactgaattcatcatccctgggttcagtcaaaggaagagatcaggaagtacctgattttctaagacactcctagaggaagatgttgataatggctgcccagcttctggcggaagtcccaggtacacctttccatgcaatgtctctacgcttcattgaatcatgacagtaactccatgcaacagacactattgctgtcccttttcacagaggaggaaactaaggcttaggttattgtacctgcccaagtacccacagcctgtaagtggcagggctgggacaactcagggttgtgtttgactccaagcaatcaatgcactgaaaacatacctgagaaatgaaacctctggtccaggcagagaataaattggctctaaagtgcattaggagctcagcaaaggaactgtgggcctgcatagccaaggaaggcttcatgaagttttgatctgagccttgaggaaggggtagaatttggacaggaaggtagga[131 bp omitted]ggagaccctgtctctacaaaaaaaattttaaattagtctgggcacggtggctcacgcctgtaagcccagcacttcgggagactgaggtgagtggatcatttgaggccaggagttggagaccagcctgggcaacatggtaaaccccatctctactaaaaatacaaaaattagccaggcatggtggtgcacacctgtaattccagctactcgggaggctgaggcacgagaattgctcaaacccaggaggcagaggtttcagtgagctgagatcgtgccactgcactccagcctgggtgacagagtgagactctgtatcttaaaaaatagtaataataaaaataaaaattagccaggcatgatggtgcatgcctgtagtcccagctacttgggaggctgaggtgggaggatcacttgagcccgggaggttgaggctgcagtgagctgtgatcctgccactgcactccagcctgagtgacagagtgagacctgtctcaaaaaaataaataaataataaaaataaaaagtagctagccgaggagtgaagcccgagctcagggtacagggtgggggtgcccagcttgacagagcaggtggcgcgctgggaattcctgcttctccccacacgtggcggcagcctggggtctcctgacccatctgaagttcaggctggccacaggcaagctcacagagatggctggggatagctaaggccttctgcagtagggcgagaaagatctgggggaaagaagagctcacgctgaaagcccaagggttagaagaagactgagcgggaggtgggggtggcactggaggggctgcaggtttgggggctgcctcccctgaactgagtgccttggggcacaggagagcccttccctaactcagcacatcctcttccccagctgtggatgatgcctgcatttggcatacacccggagtttgagaacgggctagaaaaggatttctacggctaccagatatggttcgccatcgtcaacttcggcctgcctctgggggtcttctaccgcatgcactctgtgggaggcctggtggaggtctacctgggggcctgaggctgcccacccccggcagaacctcgaagtgccaaggtggggaagatggtagcccagagtctctgagcagatgcctcattctgaggtgccgagaccagcctgaggctctcaaggcctcctgctccccagagcctcactgaaggggagggcactgcctagagccagaggccaacagcaggggcctggacactgagcttctgatgcccacggccaggcctgggcacatgcctgccccctgccttcccaccacgatccgcaagccaagggtgcaccccaggaggctggcaggggccccctcacggctactctgtgggagggtcagacctacatgaccgagtctggggagcttggcgaggggcacccctctccagccaggactcagaggtctgccccctgctgcgagaagagcacctggtccaagtgtggctctggacatcctcagagctcagagctccgagctaggaggccagctcctctccccacacacctgtctcctaatgagctcattcattggctgccaggcagggttcaacagctctctcctgccgcataaaccctatttgtttaatggattgcattcaggctcatggcatttgttcccagggacagaactgctcctccggacatggtgggaaggaatggtccttttgagtagggctgtggggctgggacagtcctgcttccgggccaggaggggtctaacccagttcttccttggtctgatccgggggaagaggtgggagagacaagtccgggctcgtgtctctccacccccacccctccccagcacaccctctctctaggacagagcccccggtgacattctgcagcgggctcaccatgcaggctgtggcccctggctgccggtcccaggcctggctcatctcctgagccatcaggtagggcaggaacggaagagaaagggcaggtgtggcaggccatccgtctccctgagcccagtgcaaacagtgggctctgcctgggacgaggccagagagggcagccctggccctgcaggtgaggctctgccctcctcctcacccacccccaccgaagtgagtcactagcaagcatagccctcccagcgctgtctcagtggctgcctggtgaggccccatggcctctcctgtgggctctttctctgggcagcaacagcccaggggcccaaaccctaggtgacagggtctgatcctgctttcccacccaagaaaataacaaatgctggttcccagtcatgcactgggggccctctggggtgcagagtccccagctcccctgaagacaagagccacacctggcccctcgcctcaaccacagagtcagaatgtggagcaggaggttttattgtaaagaggccgattgtacagagcaaagattgttctgacacggggggctgggtggtgggacccagaggccagagctgggtgaaggatgaggggtggcatcgccccatccaggcagtgggcagggcagggaggactaaacggctgcctcccagttcccttccctgcccctcattactgggtaagagggagccaggctatttccatggatccaggagaatatagcaggagaccctcaccaccccacaccatgccccaaggatacgggaggtgccccagtctggcttttgcagtcggccagctcccagcctcctcgaggagcagcctggccacacctttttcccctggagcctggaacagctggctttgggttaggaggctggaagcacccccttaccctgtccaggcacctcaagggacagcccgtggttccctggtcaaaccccttagggcacagtgacccattggcttctgcctctggggctgggtagcacaggagtgggtgggcactgaggggccagcactgagccaggtcttaaagagggagtccgagtgttgggggcagtggtctctggtgggggcatagccccagagatggggctcctgtgagtccagcctaggggttgagggggatctgagccagttcacattgtcctggccacaggggtctctagggcatgacactcagggccactctgcctgttccaggccctgatcgtggtaatttaaagctcagaatggtggatgggggaagcctcagggaccaaggccctgccttcccctagactgagcccctcgtcggcttcatcctcacacccgctgtatctcaaacagcttcacgtcggtgtcgtaccagacaggggggtccacattcctgtggaggaaatggggggttacccaggtgctggggcaccttgcagacaaggcaccaggaggagctgggcagcaggaatggccaagccaaccctttccatcccgatgtcccaccctgggcagcgggtgccaccgtcaaccaggcaaggccgccttagttgactgtcttgacatgaagtccaccataggtggtggggcccagagctgaggtccctgttgagccctgctgggcaggctctcaggtggacaccaccccactccccggggcccacctcagatagatgacgccccacatgtaggtgcggaaccacatggcagtgcccgagttggcctggtacttgcggatgaggatggggtggggcacgggcagcagccccaccagggtgccatgctgcaggaaccgcaggatctcagactcatccgtcaggcccctgcggggagaggggtatctccagcacactcacgtggtccaggggagcacggggctcaccctggccacccaagacccatgtttcccatcacacgcctacctaagcctaggctggccccgcccagagcccacctgcccacaccaccggccccgcccacaaccccggccccgcccacaacccccggccctgccggcgcccgactcacttgtcaatgcagatcttctccacctgcggaaccagcacctgcagcagcctcatgatggtctgcagcggcagcttcgacttccaggagaggacctggcgagggacggggttcctggggctgagaaagcagcccccggaggctgcggggcaagcctgaccctgacccagaaccacaggctccccaaggcagaaagtacccctgctccttgcagcatgagcctggcaccaagcaggacccgggaagagttaatccttattgatggcaagcgccatggccccgcgttaagccagagctgtgccacgtgcctctcgggagactgtggcctttagccctcacaacagcgtggtcaggcagggacggtaattatccctgtcccagcgcaactggcgtgatctcaggagacacagggcgtggggatgagattcaggggaggaagtcggaaagagtgatttattaaggaagagagcactgtgggcacctggagcttaatcctgctggggactctggcaacagtgtagacagaggaagcaaccgagccagagaggctgaacacatgggatgtcaccagccggaaggaccgacccagagtcaggcttctatgctagggtcctttgattcggacatcttgccatcttcactgagcttccctgggccaaggagccccaacccagctcccgcctcagtaccatctgcccaaaccccagcccccgctcgcctggcacagggtccctcctcacccactctggcgttgggctccactgcccactggctgatgaggtggacggtcgccgctgctccctccatgcctggctgggctcctggcccccagaaaggaacaggggtgagggatggtggcggtgggtgaggggtggagtggggggcaatgagccctctccactggcagctggaaatcccacaaaggggaaggcccagcccagcagcctttgccccaggccctaggcccagcccaacctagtgacaggtttaaggccagcagctgacagggcaggccgggtaaaggccagctcagataaggcggagggatgagaagtctgaaggccaagggcttcaccggaaccagtaaacaagggaggggtctgtgaaaggcccccacccccaagggagtcagcagcgctgaccctaatgccctgggcactgggtaactgcccctctgctgcaggtgaccccagagtgccccggcccagcccctactgcagagaccagggaggaagggaagggccagccacgcccggctccaggagtccccgtcacccacccccttagccgggctgccatcctccaagctctgctggggctcaggttccagggaccgcaaggtgccatcctctgacacctgggacttctcggtcagcttgtcaatgcctgggcagggcacaggtgggagtgaggactccctgccacagtgacccttctagcccttcctccacccacttttttatttttatttgttttactcctgcttccctctggaacctccaccggctctagaggcagtgtctgatcactgtaacgccctctcctgcgcccatccctccagagtctacactcgccctgaggctctgcccccaacaccaagctacacatgctaagcccatccagtaccctcccccatccctgtgcccatccctccagagtctacactcgccctgaggctttgcccccaacaccaagctacatatgctaagcccatccagtaccctccccccatccctgttgcccagccccatcccctcggcttccatacataagccatgctctttgccagagatgggggtgacaccccgagaccatgtccctcccccagccacaccagtatccacactcctgtcccatccactagcaccagacctggagtagccaccagactggtcttgagggtgcctggctctgcaggggcagcggggcgggagccctccatggaggtgccctcctgggagccggtgcgagacaagggctcaggtgtccgccggcgccgctgcagggccttgtgaatggtgggcgggtccgtgggcaggttggccagctggtggaagatgctgcgcttgcggatgatggcgtagaccaggttggagttgcctgtgggcagggagcatgcctcgcctcagggaggccccctccagctccccccgtccaatctgggtgggcttcctggaagggggagtttggaggacaggagggtgtctgcccaaggggttggagatggtacagggagcccaagagagggtgctggggcagggctggcactggctgtgtgtgcccactatggctatcccagaatgtcaggcctgagcacctcacaacacccccgccccagtgcctttgagttcccgccacaacccagcactaaacagctaacacctggcaaaaagtacaggccccagcatggcagcatccacgtcaggccagctgttaaatattctgactctcttcccacctcccctcgagcaaggtggccaggagaagtcacagaggatccgtccatcccccaacgctgacttctcctggctctcaggccccagtccccatctctggtcctgccttatgccatactcttcactttcagttccaacatcccaccccagggcctttgcatgtgctgtctcttgccccaccttacccctatttctccctcagagatcactgcaaatttgcccgactttggaaatagcaataatagaaactgatcatttttaagttgccaggcactgtgctaagtgccttctgggggttattttgccccatcttcccaacaccttctgagaccaggacccttagaaccattgttatgagcaccttacagatgagggaactgaggatcagagaggtcaagtgacgtgccctggtcacagggctaacgagtggcaaggcttgaagtgacagcaggcagccggatgtctgtgacactgggcagacgggctgctaagatacccatcagggacttactactctgtacttcccttttatcacatttcaggccagatgtggcggctcatgcctgttatcccagcagtttgggaggccgaggcaggcagattgcttgtctctattaaaaatacaaaaaattagctaggtatggtggggggcgcctgtaatcccagctacttgggaggc[136 bp omitted]tgaagcctccttccctgcctccatccccagctatgagctccacagggcaagaagcaaagctttgttccccactgcatcccctgcacccaggtacactgtagatgctcaataaatgtacactgaatgaatgaactgggggcagaaggcaagcaggccagcacctcccagaggccacctcctgggctgtgccccccttatgtaggaagtaggcccgctggccaccctgaccaccagggcctcaggctggtgcctcaccatcaaactggtactggatgatgttgttgaagacctccaggaggaagaagaccaggtggtggttctgggcggcagagaagaggaaccaggtggtggagaaggcctccagcaggtgcagcaacttgttggcagtcaccatggacaggctcttgaggtagggggacactgtaagggaggggtcagctcactcctgggcccctcagccaagccatccctgcacatcctgggccggggtggaacaacaggctcctgctctcaatccctccctgccccctgcagagccaggacgaccaaggccctaagaggctgagtccacactggccatactgtgtgcagagtcctgggaggcagttaggccccaccctcacccctcgaccatgaagacagctgtcctgcttataaagccatacacatcccacccatgccagtcccccccataccacgagggaggcaggacacagacaagatcatccccattttacagacatggaaactgaggctcagagaaggttgtaaacttggcccaagttccccagtaatgaaatgatcgggcagggatacaaactcaagactttaaatctttctagaacgtcaagctgccatgtcactagaggtgtattttgggacccaaccctgggggcacacccagactgaagttccatgctgatctgaacacttccttgtcttgtgtcattttccctcactaggctgagggctccacagggcagggaccagggctgtcttggtcacaagtgtgttctcggaaccagctcagttaagatttgtgagatggagccagagagtgaaccaggaggggaagggacagtcctgaccccaaagctcacagcccagctagaggcctctaccaccgcacactacccaccctgcagtctaaaccagaacacagacagaccagccacccctagccacaaccatcctctccaaaagatgttcacactgaaggcattttgccccagcccatggccacctgccttgctaggtcctgaaccccagggagcctggctccttctgcttcctctccccagcagctgtgtgcagtccttgctgggtgggggtaggggctggacagggaggacaaaggcagaaagggtggggcctccacatccccatacactgtgactccaaatgtccaaacctgcactgcccaacacagtggacatcagccacgtgtggccatttcgtgcttgaaacacagctagtcctaacacgtgtgctgcacatatgaaacacacaagaggccagacacagtggctcacgcctgtataatcccagcactttgggaggctgaggcaggaggatcatttgagctcaggagttcaggacaagcctgggaaacatagtgagatcccgtcactataattagaaataaaatgaaatatggccgggtgtggtggttcacacctgtaaccccagcgctttgggaggccaaggcaggcagattgcttgaggccaggacttcaagaccagcctggccaacatggcaaaactctgtctctactaaaaatacaaaaaaaaaaaaaaaattagccagttgtggtggcacatgctgtgatcccagctacttgggaggctgaggcatgaggatcacttaacctgggaggttgcagtgaatggagattgtgccactgcactctagcctgagcaacagagagtgagactctgtcttaaaaataaaaaataaaataaaataaaataaataaataaataaagtaaaaatgttatcggactaccagtggctcccataaactgggctaacctccttcagatgtcaaaaaaaattgttaaattttttttttttaaaaaaaggccagatgcagtggctcatgcctgtaatcccagcactttgggaggctgaggtgggcatatcatctgaggtcaggagttcgagaccagcctggacaacatggcaaaaccccgtctctactaaagatacaaaaattagccaggtgtggtggcacacgcctgtaatcccacctactcaggaggctgaggcatgagaattgcttgaacccaaggggcggaggttgcagtgagctgagatggtgccactgcactccagcctgggcgacaagactgagtgtgagaagggaatattaaatatctcattagtaattttcatattggctacatgttgagatgatgatagataaaacatattattcaattgttgtcaccctttttttttaatgtggctactatgaagggtacacaagcttgcgttctttctgtgggctggaggggcttgaaacctggagcaagtggcaggttggcctgtggcctgacaccacctggtggtgagcgcggggagtgcaagctccgggcccctaccgttgaccacgatggtgagcaggcagtcgaagaggggctgcaaccgctggtgcccgctggtgatgatcttgtggaacacctgtgccaggagggacagaggcaccgtggggtccccgctgcctccagactcagccaagaggacaccacccctgcacctcctgggcccggccgcacgagccccctcaccacaatgagcaggtcggcgtgggtccctgtgaagactgggatgtccatgggcacgcggattgagtagggtttgttcagccgcaccccgaagttccgctccccgctcagaagcagcaagatgaagacaccaatgtgcatcaggcccacccgagctgcggcaggtggcgtgggaggggtcactcgggtgggagggggaaggaggggcccaggcagtgaccattttggaggcctccctcctaggaggtcagagtgccaggcctgagctcctgggagtcagggcagatagccagccctccacctcgccgccaggaaagcccccagcatcccacccccaccctggtcttacactgatcggcccgggcatcgttgaggaagaagaggatggggacaaggatgtctaggacgtcgctgctcttcagcacgaagaagaggaatttctaggggtgcggggaggggccaagtgggctgagttcaagggaggggcagctctgccccacccccctcagtctgacactgtccctgcccccgggttattggggcagctgctctccatctccctgcagggcccctcgaggctggcccaccttgttgaagtcgcagagcttccagaagagaactagcagctcctggtggaactggatcttcttggtggagttaggcaggtaggtctggagcagggggttggacagcagccgggctatacccttgaggatgaactggaagtcctgggggcgagggcagagcagggggcctgtccagcccaatccctgcagctccagtttcccagcccaggcccccaacaaatccccccctccatcccccagagccagatcccacctccagagccagagggcccagatgctatcacccatagctgtcctggggcgatgcctcaggaagcggagtccctcatagctgtggacagccctggcccctccactagactgcagactctctgtccttgggctgtgcgccccttgagcaaggctgctgctctcagtgaactcccacacatgcacaccctcaaccttgtccctgcccaccttggactcatggttggcaggttccatccttctacccctccccaaaatactcccccatcaccccatcacaactcgaggagcattccactgttctgtcatttactgaggcctgccactagctggggtgagaaggcagctagggtcctgtgttttagctgcagaagttagaactctgggagttcaagcaccttcccaccaagatcacaagacacatgaactgggactgcttggcctgaagcccttgtccactgtcattccccttttgtccccaccacctctgaaatgacatcagccacctcctcctagaggccttcccagttacctctacccaggtgaggccatcagcccttcctgcatcttgaaaccctcacagtcctgccactatttcacctagggtggccccagcccacagagagcatggttccttcatggaggggtcaggatcccccatatccctgtctcacttgcatccccctgcaccctgcaaagccactgtggggactggacttgcctcctcacgatggatgcgggacaggtagttcacaaacaggttctcagggcctggaggctgccaagaggagaagcccctggtgagcaggcgtcctccccacaacccgtggccccggcagctgtcccttccatgctcccatccttacatcggcatcatccatggcggtgccagtggtggtgccgtccacagtggggctggcactgctggcactgtcgtggtccaaagtgacaatgagcacctgggcagcctcctccaccaggggttcccggtagtcagagaagagcaggtggttgtaggggatcccgtagcccacagggtcataggcacacacggtgttgaggagggaggtgaagaggggcagggcatgtctgcagcaggagagggacaaggctgcagaggctgcactggggcccagccccctggccacacctctctggccacgtgggaaggtcagcctcattcaacaagcattttagcaccacgtcagggagtggcttggaaagagtgggtgtgggaagcccagagccatgattaggacacattcataccccttagggtcttaaggggcagataccctcccttgggtcctcagagatgggaatggaggcctgtggagaaggtgggcttcccctcagggagcagagcccacgctcagccaaccagctcccaagccacagaatgactccactcagactcaagagatgtcagggttcaagctgctcagcttacagatgaggaagctgagacccagagaggttaagtgagggacaaagggtggcagtttgcctgataaggctggtgagaaagaaaactctggccagcctcggactgtggctggtggagggggtcgcctggctcccttctcttctggagtagggtggaaggttgaacagaaggctaggaaacctgaagaataaggcgtgtcatgtagggaccagagtctggaaggcggaggtcgaccgccacctgccgggcacagaccctatgcagccaacacagctcccagtgggagctacctgctcaaatactcaactctgccacgtggcacgtgtgacaccctccccccaccccgtgctcacgtgtcccccacagtccatgagtgccccatgtgggctgggcctccctgcccttcgaggtatttgtcacacactccccgacccggtctctaagctgcagagtcccacacagcagcctcaagccacaaggagctgtcgagcccttggaatgtggctgatcggaaccaagacaaatacacactggattttgaaaacttagtatgaaaagggggatgtcaaacagctcagtaatgttgtatactgattccatgttaaatgctaaagtttggggtatattgggttatatgaaatatattattaattattgtatttatttatttttttttttggaaacagagtctcactctgtcacccaggctggagcgcagtggcgcaatctcggctcactgcaacctccgcctcccgggttcaagcgattctcgtgcctcagcctcccgagtagctgggattacaggcacccgccaccaagcctggctaatttttgtatttttagtagagatacggtttcaccatgttggccaggctggtctgaaactcctgacctcaggtaatctgcccacgttggcctcccaaagtgctgggattacaggtgtgagccaccgcgcctggcccaattttactttttaacttttttaattttaaaattgcactcgtggtttgcattctatttctactggacaggcggctcttgatggaggacccagggacggattactgaggggcccccagattctgtcctgtcgaggactccaaggagagacggggctagtgtgaggtgtggctggtaagttaaagttcatcaccaccagggggcagcacctcccctcaaacgagacccagagctggcgaatggactcagctctggattgcctggaataagagggaagagagcgcagaaaggccaagggcccttcacctgttctccgtggaacaaaagaactgaacccatgggttggtgctgccactttccggagctgggggcaggtacatggcctcggagaagcatgtcagcagcagtttcagcagctccatccttgtaggaggaagggggagggcaccttaggatcccagtcccctcttggaggttctgcccacccagcccagcgccccagcccaggtccatggaaggaagttactcccgttgacccctgtaaggtcaaggtcgggtcataggtgaggacggtcttctgggaagaccccatgggctttctgagctgtgcgggggcccggcccggggtccagctgcattgagggctccgggcctgggcgaagctcaccggttcatatcgtggatgtagttaggctggggggagtgagcgaagcccacaccagcctcccagatgtattcacagctgtccagggagtggacgtcctctgccgagtcctggggacaggccaggaagaagccgggttagggggtcgagaggtgaacagcagcctgggtcagaacctggccacctcgagcctcacacagtcccaggggcagagaccgccagttctcctaaagacaggtcctcaaaatggcctggccctcatgcacaagagcaggagtgaatattcttaggcctcttgaaagctcatttttcttccatctcagactggttctttcacttgctcagtccagtttgggacagggagaaagggagggaggggcaggggattgggtgccccgggtttgggggtgggcagagaagactcaaggtgaagtccatgccaccacaggaagcaagagggccagccctcctgtgtctgagccccacacccctgggcaagcaaagacaatgggtgtctgtgcccagccatccgaacgcagcgggcagggccagccccagctggcttccctcagctgtaccagctgccacccaggcctacatgtgccaggcagctcagctctcctggagccccccggcccccagtgcaatccgcccaagggaacttcaactggcccggccccaacccaggaccagagcctactccgcctgggggtggggggctgggggacactcaccacagtgctcctccggtggctctgaaccgtgaagtccgggcagaagagcaggtcagcaatggccaggagcagggactcggccaggggcctggcatgctcatcatcctcttctccctgctggggacacagcacccacaggctgcctcagtgatagctggccaggaagaggtggcccagggcttgggggtggtggaggacaggggctgagcccaggcgggcacccatgggcagaggaatgaagggacaggaagtggactcctggttgccccaaacctcccaaggcagaagtggggcacagcagggagccgggccgggaacagcgagggaacctcccctactgactggagggggccgggcggtgaccccaacatcaagagtctcagccctgctaggaatcactgtgttgcatccctcagcacctcacctggacataaacccagggcaggtggtgtgggggagagaggacagtgtggtccctctccggccctcagagggcccagctcctctgcctccacctctgcccagtgacccctggctctcagcttctctccataccctacttcctccagactgtgggcacagaaacccccatgggaggggaactgagggcccaaggaggtggcattgaacaccatccctcagcagcacccactggccccacccctgtacttcccaaatcccagaagaggcttggaggagcatggccggccctaaagggcgctctccctgtgacgccaactctgcctcccacccagccctggccaggcccacagacccctcctcgccctgccccgggcactgtggaccagaagaagcccctccagtcggggtcctcaaagatgtagggcagcacgcgggtgagcagccggctgcagttcaggacgatctgcttctccttctccgagtggcagccactctcagctccctgcaccagcttctcaacggcctgtgggggcaggcaggagcagagggcaggctggaaggtggggaaaggaccctggcacttggggtcagggtgggcacccaggctgcagaggagggtcagggggggcacccaggctgcagaggagagacagtggggccacaggcagaggagccacctggagttggggtcggccagccttgggggactgggacacaggccagagcagcttggagcatcaggacagccagggcccagctagccactggatggctgaggccttgctaagtgagtctcccagcctcagtttccctatctgtaaactggcgaccctggcagtacccaccccacagagggagctaaatgaactgatctgtggaaggtgctcagtcagatgtggcctggaggactcccccataaatgacggctgccgtggtcccaacgcccagcaaagagaaccacagagaagtggaagagctgagtgaggccacagggctgcctgcccctgtggggcgggaggccctggatgcgcctgccttctcctgctgtgggctgggagggtggaagagtagcaggagggactgggcagccctcaccttgtagcacagggtggccaagttggagggtgactcttcccgcacggcccggatctctgctgccggcaccagtgcaaacacatcctgcaccgaggtggctgtgtctgcccagaactggtcccaaaaggcatcatcggtggcttccacgggctgtggggggaccaagggtccagagttacacaactcctggccagagggcctacactttgcccaacttgtggccaggagagaccctgagagggaagccagagtccccctacctgctggggtcccagagccatcccacatgggtgggggacatacttcagccaccacaacccctggacagcacagtcaggctggagacaccaggcatgcatggtcaggggtcagctaggcacagagtcagccaaagcccaacgccacccctgaggaggtgtgtgaccctggttaagtcaccatcctcccctggcaaagcaggctgacctccccacctgggcacagccccaggccacaccattaggtcaaatgctcagggatccaggtcaagaccatgccctctctccatgggaagaagacaaaggtgacttgtactccgtttccagtcacccaggatgcccgccacaggcctccggctctgccctctcacagcacacccaaaacagctgccacatctggtgaattcacctctgtggctctctgaccccaacacgcccctctcagcgcccacctccagcgctgcagctcaggctgcccttgccagggctgccaacttcaaatccacctctttcaaccctgcctctatgctgctgccaacgcatgcaccgaggtggcatcctgcatgcaccacggcaccgctgccacaggcactgcttcctcacccagagcccttcaggggctccccactgcctgctgggacaagtccaaacctcagcccagcactcagccaagatctcacagaaacatgccttacacacgtgcacacagacacacatgcgtacacacgtgtcatacacacatacacctgcatttactactccaggactccaccctgccatctcttctcttgaccttcacccaagctgttctctcttcccccttccccttttccccacaacaatgcattccaaaatccattcccacggaggcaacaggccttaaaaacacacatgcccagccaggcacagtggctcatgcctgtaatcccagcactttgggaggctgaggtgggtggatcacctgatcaggagttcgagaccagcctggccaacatggtgaaactctgtctctactaaaaatacaaaaattagccaggcgtggtggcaggcgcctgtaatcccagctactcgggaagctgaggctggagaatcacttgaacccaggaggcagaggttgcagtgagccaagatcatgccactgcactccagcctgggcaacaagagcaaaaccccatctcaaaaaaaaaaaagtacacaagatataaaacttcgtctaggatgctcacaattcatgttaaattatacatgaataaaagactagaagaggctgggtgaggtggctcacgcctgtaatcccaacactttgggagactgaggcgggtggatcacaaggtcaggagttcaagaccagcctggccaagatggtgaaaccccgtctctactaaaaacactaaaattagctgggcatggtgacgggtgcctgtaatcccagctactcaggaggctgaggcagagaattgcttgaacccaggaggcagaggt[135 bp omitted]gttttatatttttctttatgtttttctgtaagagcacatgttactatttttttccttttgaatgttcatctgttaagggaccagagtgtccaaggcacgcgcacctcctcgggcccatccctttatggctccttctgagtgtcacttcctgcaagacaccttcctgctttctccaacacagcttttttccttctctgaaatcctacagccaataaaacctgaggtccctgctaccaccacaagcctgcacttcatacatgttactcttatcatcagaaaaaaatatatatcttatttaaaaataattctggggccgggcgtggtggctcatgtctgtaatcccagcactttgggaggccaaggtgggagaattgcttgagcccaggagttcaagaccagcctgggcaacatggcttttgtagagaccctatctctacaaaaaataaaaacaaattcaccaggtgggcctgcccaacctctaaggaggctaaggtgggaggatcccataagcccagaaggtcaaggctgcagtaagctgtgatggcaccactgcactcaagcctgggcaacagagcaagactctgtctcaaaaaagtaataatggccaggtgaggtggctcacacctgtaatcccagcagttagggagg[135 bp omitted]gaggcagaaatcgcttgaactcgggagttgaaggttgcagtgagccaagatcgtgccactacactccagcctgggtgacagagtgagactccatttcaaaaataataataataataataggccaggcgcggtggctcacgcctgtaattccagcactttgggaggctgaggtgggtggctcacgaggtcaggagtttgagaccagcctggccaatatggtgaaacccctctttactaaaaatacaaaaattagccaggcatggtggcacatgcctgtaatcccagctactgggggaggctgaggcaggagaatcacttgaacccaggaggcggaggttgcagtgagccaagatcgcaccactgcactccagcctgggcgacagagtgagactccgtctcaaaaaaataaaaaatataataataataatggctgggcacagtggctcacacctgtgatcccaacactttgggaggctgaggcagatggattgcttgagcccaggagtttgagaccagcctgaacaacatgacgaaataccatctctacaaaaaaaatcaaaaaaattagctgggcatggtggcacacacctgtcatctcagctacttgggaggctgaggtgggaggactgcctaagcccaggaagctgcagtgaaccaggatcgtaccatggcacttcagcctcggtgacagagtggttcacacctgtaatcccagagctttgggaggctgaagcaggaggatcacttgagcccagaagttgaagaccagcctgggtaacatagtgagactatctctacaaaaaaaaaaagaaaaaattagccacgtgtagtggcacgcacctgtagtcccagccactcaggaggctgaggcaggaagatcacttgagcccaggagttcaaggctgcagtgagctgtgattgtgccactgtactccagcgtgcatgactgagtgagaccctgtctctaaatatttaataataataattctggtctctgaagctacttcttctaagaagcctcccagagccccaggcttgcttgctcccacctgggaacctccggccccaccccacccccaccctgcgttgttcctgcctccacagtctgggtgcacgtgccttgaagccccatcagtccctgaccttgccagtaaggcatatggcagatattcagccaatatttgttccactgaagctgcgctcagtcctggggaccccttcagcctggccacagagcagggctgagcacccgtggaactctccaaactcagagttggggtcgcatgcctcaccaaggtccaggcataccccagcccactcccagagcaaacacccccaccccaccccagggagctgcagggtaacatgtggccatgactctcagtcccagaactggtagagcgagttcttcactgggggagaggaacaaaggctaaaggagggccctggggctggggtttgctggcccttgggccctcagccaggacagccctctggcactccctggagcgcagggacatggcaccccagtctgggtggcctggagccaggatggggtaaggaaggacatcccaggaaacccacagagccatctgggagtgcctctgggaagccgccatccctgacacttttcccacctcccaggtagctactacccccttcaaagggcagaaactaagcacaagcaggcatgacctctgacctagttcatcaggcagtgtcaccgggggactaaatccaaaatgaagaaagagacttactagcccattctggaagcagaggagagatcccagccatgacagatctcagccttgaactttaggaacaggactttgcctccctgtttcctcagcttgggcctcctctcctggtcccactgtggcttggacattcggatttggtgaccacctgcccaggccaagctgatgctacaggcattagtcagggtcactgaggccccttaggcttctaatgggagaaacgtggctcagcgcctgcctcaatgaccccagttggcctccacccagcccgcccaaggaagcttctaatatctgatctttttttttcttttttgagaccgagtcttgctctgtggcccaggctggagtgcagtggtgcaatctcggcttactgcaagctgtgcctcccgggttcacgccattctcctgcctcagcccccgggattacaggcgcctgccacgacgcccggcta[136 bp omitted]tatctgatctttgaaggaagtgtttttgctggaggtaggcaggcccctgctgctagggccacagaaactgagctaccctggtaaaaatccaggtattcttctccccttattctttttcttttgtttgtttttgagtcagggtcttgctccgttgcccagactggagtgcagtggcacaatcatagctcaccgtaaccttgaactcctgggctcaagtgatcttcctgcctcagcctcctgagtggctgggactacaggcgcaccccacccagcccagctaattttttttattttttagagatagggtcttgctgtgttgcccaggctggtctcaaactcctgggctcaagcgatcctcctgcctccacctcccaaagtgctgggattacagccatgagccaccacgcctggccaaaatcagatttttcttttttcttttttttttttttttttgaggcagagtttcgctcttgttgcccaagctagaagcatgatctcagctcaccgcaacctctgcatcctggggtcaagcgattctactgcctcagcctcccgagtagctgggaatacaggcatgttccaccacgcctggctaatttttgtatttttagtagagacgaggtttctccatgtcgctcaggctggtctcgaactcctgacctcaggtgatcctcccacctcagcctcccaaagtgctgggattacaggcatgagccaccacacccggcccaaaatcagatattcttaacccagcttttccaggcccctgctcggactagacccccactcagacctgggggagcagttgtatcttttgactctcagggtgtgcagggggaaggtcccctagtcctcaagcctgctaagcctgctctagaggactgtgtcaccatgcattcccatgcacatacatgtatacacatgtaaatatgcacccgccaggttcatctggcctgcagcagagaattccaaacaggcaggatctgggagagggttccaggtctgggactgtctccctccagagccccacctactatgaggaagcaccaggaaacacagccaaagcggctggctcttaggaccagggtcaggcctgacccaggactggaccatggggcaggaagaaaacaggatgcagggcaggaaggcgaggaaggtggagcagcagggatacaggcccaggccacaggaaaaggggctagttctgcctgtctactgcccaagccacaccctgtaagagcctggaaccacatatcatcctatggacaactggcctgaatctccttggggactccaagtggtaaggtcagtgatgatcatctgggttctgatcctcacacccaagctacccaagtcaggtcacttacacagagtccaaggcttcagcctctgaaggcctctccccccgggcagcccaggcccccgtccgcctacaggacccagtgctctccagaaggctggtctgatctccagcctatccaggttctattccaagcctactcagctgggaaacagaacagcaccatctcaagtggcccatcatagggctgtagccagggaaagacagagggacacagtattttggggaaaaggcctgagcaggtaggaatctaggccactccagagcctttggtactctgctgagctggccccactggcctggcaaaggaccccagctgccgagcccacagtgcaatcctccaacaaggagtttcttccccaggcaggtaaacatgggagcctcccttcctccctgcctccccactcctctccctgcagccctacactgaggggctagcccacttgccaccttccctgccacccacagaacgaaaaccccatcctaaaaaagccaagctccagaacgacccaggagccgtagggaatggagagaagtgcggtctggtttctatcaagagcctttcagccggggttggactctccagaggccctgggcatttgctgcacatttgacccttccagggtggggaaaggggtgagggagcaaggtctggcccctggagctgtgaccagctggctgtgggagctggcttcctccatcccactctaacctccagcagcaagagagagccctggagagcaggaggtgggggggccaggaaagaggaagatcccagatggcagcaggtcctgtgtcccctgaaaatgggggacatggggagtcagggccgagcatctctgtggccacggtggcctgattcaaaaagccaggagagaaggggtgggcagagaagcagtcttgctggggccaggtggtataaggaggtggctattgggccacttgtggactcacaggagagttatgagcatggactaggctggagggtccttaggcccctcaccagctgactgagggccatcctgcgggtccccatccctgagccagagaacagagcacacaggctaacagcctttcccttgcagggcctcggggaaggcccctggagaggtccccagctgggaggctgtgctcagtaggcctggggacagggccccccaccaggctgcctcgctgcccgccactctttgcgtgttcccaggaagacctgggccttccctgcccacgggcatcgaccagggcccagcgaggccgctgccgcgcacaccagctgtttctccgacccgggcggacgccagccaggctttgtttgcattgagtcaacagggactgtgcgtccgggacccgcgggcaatgaggggcagggaggggagcggacggtggatgggtgggtgggggcggcgggaggctggagatgcgaagctggggacgccgcggggcgggacagggggcggacagctgtgtcgccggctcggggagtaggcacacgtcagcctaaggtggcagcagcggcttcggggagaggggtgttcccaggagaggaggctgagggtgggggactagggccaggggatggagcttccaggtacaggccgcggggtcccgttccggcgctggccttggcgttacgctcggggcccgcccgtccccccatctcccgacgagccaagttcgcgtacccccggccctgcccagcccccagcccggcaggtggatggggacgccggggcccccgtggcgcacctgcgtcttggtggtgagctggatcaccgccttccggaagttcagcttggagtcggtcgaccccatgtctctggagcccgctccggcccggcccccgcccagactccaacccggctccggcttcagctccggctccagctccgcggcccccgcggctctcgcaggagacaagcggcgcgccccgcccccggccctcgtcggccccgccccgacaggccccgcccccgcgtggctccgcctcctgcacctgcagcgcccgccgccgaagacccgcggagtcggcggttccaacccagcgccgccgcacgccgggtgccttctcaggtcccacccggagcctcgacgctcttccttctgcgtcggagcattgtacccgcctccgctgctaccacgcagtccccagggcccaaaaccctcctcgcagctcgtcccccgccccggtcctcacccttcatctccgctccggctcctggcccacgtctcagctggccctctccatcccactttcctccttctcagtctgtctttcccattcatgttttctgagcatccactctcttggttctccctttttctgacctgtcaaacccacgtgttcagacagtcccgcaggcccttggttatgagggagggaggcgctgactcagtttccatactccaggaaagcagctcctcgccttgctgagcgcgagagtccctcgcggtcccgacccctctctagccaccagattcccagagaatcctttgagattcatccatttcaacaaatgtgctgagggtctggtatttgccaactctgtgtcatggacggacacagcggacataagtagtacagcctgctctttatggcgagcagctagggagagggataaggaaagaagcggccagggtacagccaaataagcctgtaatagaggcagattaatcatcaaaacaaggccgggtgcggtggctaacgcctgtaatcccaacactttgggaggc[134 bp omitted]gaagt[131 bp omitted]gatatctctaatagctacctctgaggtattattttatccccattttacacttggggaaaatgaggcttaaagcaattacttgcccaaagccacacaggtagtaaggagctcatccaaatgaggctgcgctttttccacaacatcattttgcaagctatgtctggaagcttctggaaatcttggatgcttttttattttttattttttgagatggagtttcgctctgtcgcccacccaggctggagtgcagtggcacaatctcagctcactgcaaactccacctcctgggttcaagcaattctcttgcctcagccgcccgagtagctgggtctacaggggcccgccaccacccccagctaatttttttttgtttttagtagagatagagtttcaccatgttgtccaggctggtcttgaactcctgacctcaaatgatccgcctgcctcagcctcccaaagtgctgggattacaggtgtgagccaccatgcccagccctattatttatttatttattcattcattcattcatgcatgcatgcatgcattttgcagacgaggtttcactctgttgcccatgctggagtgcagtggtgcaatcatagctcattgcagcctcgaatgctgggactcaagcaatcctcctgcctcagcctgctgagtagttaggactacaggtgcacaccaccatgcccagctaattttttttttcattttttgtatagacaggatcttgctacattgcccaagctaatccccaactcctggcctcaagggatcctcccacctcagcctcccgaagtgctgggattacagatgtaagccaccatgcctggcccctagatgcttcaaaaggatgtgacattcacttaaagaggaattctacaggtgaaaaatgaggggcacgccatctgggagcaaaagtgtggcagggtggagcgggtgtggagggaaagaggagtgcgaagggtgtcgccatttcacggaacaaacaaactccacagggcaatgatagggtagctctagcctttctccggaggtgggttttccccgccctgggcaaaatccttggcaggtttcatggcttttctaatcattccaagataatgaatgaatagttcctttatttggcattaaaaaaaatccagtctattctacaaatcactcaaccgcattccaggccagagtgacattaaaaactctcaatcataatcattagggaaatgcaaattgaaaccacagtaagataacactacatggctagcacaatgactttcaaaagctggcaacatgctaacagtttatttctttatttatttttagttttttgagacagggtctccctctgtcattcagactgtgcagtggcatgatcacagctcattgcaccctctacctccaaggctcaagcaatcctcccacctcagcctcccaagtagctggcattacaggtgcacaccatgacgcccggctaattttgtattttttatacggatggggttttgccatgtggcccaggcggtctcaaactcctgagctcaagcgaccctcctgcctgggcctcccaaagcatcgggattacaagcaggagccaccgtgctcagccttcaaaaagaagaaaaaataataaaggcaagtgaaggtatgaagaaggaggaggagaagaaggagaagaaaagaattgagaactcttgctaaccagccactccgggtgaaattttgacccctttggtcttgcccatcactcagagccatttctgtggcttgcaaccaggaactcccaagtgacatggaaatattactggatttaattgagtccaccctcacctagcctcaggggctcttctaccactcagatgggcattctcctccatagatcatcttttttttttttttttttttttttccgagacggagtctcgttctgtcacccagcctggagtgcaatggtgcaacctcggctcactgcaacctccaccacccaggttcaagcaattatcctgcctcggcttcccaagtggctgggactacaggcacatgccaccatgcccggctaatttttttgtatttttagtagagacggagtttcaccgtgttagccaggatggtctcaatctcctgaccttctgatccacccccctcagcctcccaaagtgctgggattataggtgtgagccaccacacccggcccttagatcatcttaatgccaggaaatcttacaaagtctctgtgcattcaccccaccacggcatggaaaaaaacataacattgtcctgaggaacttgaccactaacatatctaagtggaaaaatacccattcatccctgaccgttatttacattctctaagttaagcttaacatcctctctagttccaccagtaattatgtttttaaaatgctgtcagttgttttccagtgatgcatattgatatctgtagtgactgggcatttgcttttaaatctactgcagcaaagaaaaacagttcgttccaccattctgtctacttttgtgtgtgtgtgaaaacttttatagtaaaca[148 bp omitted]cccatctctactaaaaaataaaacataaaaaaaattagctgggcatggtggtgggcgcctgtagtcccagctactcaggaggctgaggcagcagaatggcgagaacccaggaggtggagc[138 bp omitted]acacttactaaataaaacaaaataaaacagagcttttaaaaaatttttttaattacgtatccctgatcaatttgagggttccctggtaggttcttcactgtgatgtctgcatatagaaaccatgtcctgttctcctttatgcccaccataaaaggaagactcgcaggtctatggctgtcatggccctccctggcaccctttttctgag[131 bp omitted]catggtgaaaccctgtctctactaaaaatacaaaaatttagctgggcatataaaaataataatatttttattttatttatttatttaattttttattttgagatagagtctctctctgtcacccaggctggagtgcagtggcgtgatcttggcccactgcaacctctgcctcccaggttcaagtgattctccagcctcaacctcctgagtagctgggattacagatacgcgccaccacaacaggctaatttttgtatttttagtagagatggggtttcaccttgctggccaggctggtctccaactcctgacctcaggtgatccacccaccttggcctcccaaagagatgggattataggcatgagccaccacccccggcctctattataattttttgtgtgtgtgtgagacagagtctctctctgtcgcccaggctggagtgcagtggtgctgtcctggctcactgcaagctctgcctcccgagtttatgccattcttctgcctcagcctcccgagtagctgggactacaggcgcccaccaccacacccggctaattttttgtattttttttagtagaaacagg[138 bp omitted]agaggagggagggaggaagacagacacctgatttgagtgaaatgtagagagacaggagatacgcttgaagtggaccaggagcagaccataaagggctgcatacatcctgataaaaggcattaatcttattccatgagcaacaaagagcctgagaagcaggggagtgatgtcatgagatgtcattagatcttaatgaagccatcctggctgcagcaggagagagaaatgacctgaacatggggaatccagctgggaggtgagagctgatgagggctcaaccaaagcagtcacagatagatggagaggaagcaggcaggtggtattgacaaggtggagtcttggaacttggttttctatctcatatgtgttctaggtaccattgctgcataacaacctttccaccaaacttggtgtaaaactataaccattttattatgttcacaaattccatgggtcaggaattcagacaggactcagctgcggtggctggtctgtgcttcacaatgtctgcggtctcagctgagaagaccagaatggctggtgctggggttaacttggaacagctggggggctgaaattaccaggtggctttactcatacatctgatgcctgagctggcaggacccaaagactgggttcagctggggctgaagacagacacaccaacgtgtgacctctccatgtggcttgggcctctctcagcaaggacactgggctctgtgagggaacacccaaaagatgcatatgaaaataggaagtggacacagtggctcacacctgtgatcccagcactttggaaggccaaggccggaggatcgcttgagcccaggagttcgagaccagcctgggcaacataacaagactccatttctataaaaaataagaaaaaaatactagccaggtgtggtggcaattacctgtagtctcagctactcagaaggctgaggcaggaggatcgcttgagcctgagaggttgagaatgcaatgagctatgatctcaccactgcactcagcctgggtgacagagcgagaccctgtctcaagaaaaaaaaaaaaagagagagagagaaagaaaaggaaagagggtgttcaagagaacaagggggaagttgcatatctgttcagcatccagtctgggagggaagtaacatagaaagtcactttcaccacactctattggtcaaaatagtcacaaggtcaccagattccaagggagaggacctctaccccacctctccatggaaagagtgtcagagaatttggtaccatattttatttttatttttatttttatttttatttattttttgagatggagttctgctcttgtcacccaagctggagcgcagcggcgcgatctcagctcactgcaacctccgcctcctgggttcaagtgattctcctgcctcagcctcccgaatagctgggactacaggtgtgcaccaccacaccccgctaatttttgtatttttagcaaagacgaggtttcgccatgttggccaggctggtctcgaactactgacctcaagtgatctgccgcgtgcctcagcctcccaaagttctggtattacaggcatgagccaccacgcctggcccatgtcacccttggtgcctctcttcctgctaccaaccccccaccaaccccaaccaattcatcaccaagtcctatggtgttatccatcaaacatatatattgtatcatcctacggcccttcatctcccccgccctcacctttgccagggtcccataacctcccacctgtagcagcctccactcatcccctctcccacctactctctgcagaacagcccaagtaatttgaacatggagctcacatcactcccccatgaagactcctctgagcactgcgtcaggagcaacctccaaggccccgcaaagtctgagcctgcttctcctcccttcagtccctgggttccacccacgtgggtcttccttcatttttctcaaccactctaagtctttctgcccaggatctttgtatagtttgttccttctgcctgggacatccctcctcccactcctcatgtgactgtccccttttcgtcctccagggtcttatcttaaaagtctctttccggccgggcgcagtggcccacgcctgtaatcccagcactttgggagcccgaggggggtgggggttggatcacgaggtcaggagttcaagaccagcctggccaagatggtgaaacccatctcaactaaaaatacaaaaattagccggttgcggtggcaggtgcctgtaatcccagctactcgggttggggcgagatcattcagctacttaggaggctgaggcaggagaatcacttgaacctgggatgcggagcttgcagtgagccaagatcgtgtcactgcactccagccttggtgacagagtgagactctgcctcgaaaaaaaaaaaaaaaagtctctttccctgagagatttcccagctccacc[151 bp omitted]cattctcctgcctc[214 bp omitted]gtctcttctactgaaattcaagcttcccgtgagcaaggactgagtccgttttgttctctgtatcctcagcactcagcaccatgtctaacacatcataaatatttattggacaaatgaatgacaataactcctgggcttccagcttgggtgattacaggaggaggagccagttgatcacccactttagtcaataggaatgacacattttggccaactctttctcagatttatctttttttttttttttttttttttttttgagatggagtctgtcgcccaggctggagtgcaatggcacaatctcggctcactgcaacctctgcttcctgggttcaagcgattgtcctgcctcaacctccctggtaggtgggattacaagtgctcgccaccatgcccagctaatttttgtatttttagtagagatgggatttcaccatgttggcccggctgatctcgaactcctgacctcgtgatccaccttccttggcctctccaaatgttgggaatacaggcgtgagccaccgcgcctggcagattcatctttgattagttttaggagtttttcaggcagggcaggtggatctgacctggggcaaagggataaggaacgctgtgaattgtggagttagggggtcattgggaagaaggccgaagaaggaaggccaagaaaaatggcttagaacatttcttcattcattgggagacctgccatgtgccagccagagtccctgccctcaaggagttctcagtctgccgggaagcagaagggtcccacgcagagagcctccatgctgtgacgcggctgtgctagaggcgggggagcccaggcagccctcagcgggcaaatgcacctggggcttctccccaggtctcttctcccaaggctgagccttgactgcaggctccacctgcctccccagccagaaaggtaaagtccctgcactggcatccccagcctgccttaggagccctgccagagatggggtagtgaggggcaaggaatagttcctccaggtgaaaaccgataataaggccctaatagtcactgaccgtgctcggcagaccccagcgctgatctaagcgctggcgtgtatgaactcatcgcaccctcccaaccagcccaggaggtatcagaggagtaaggttggatatcatcagcacaagtctcctaaaggtcaccccactgatgacaggcctggagggttcacactgcagagatttgaggtagacatatggaggcatttcccgaccgcaagaaccttgagaatctgaaataatgtacccttcagagcacacgattgtctggaacaaactcagacggtgcatgggggagagggggatgggcagcagatgacctcactccaatgtcctgagcgccttaccccgccaggcgctgacctcagactggtggaggggacagatggggcgagatcattcagtacagtgtgcgcccagcgctggagcgaacatgtccggggacagggagggaggcgccgcttgcaggggtgtggggactcgaggaaggtttccagatgtcgccctatcctttaacctcaacccgagatgtgcagcgcgcgaggtcggtcgacgcccttcgcctcccgcaacgccgctgtgcggttgggggcggtgcggtccctctgccgccagcgcagcccgcgagccgtcacttcctgtgggctgggccgagccgggctgcgcgcggaggtaggggatgcaggctgggggtgagcagcagcgacggtgccatcggctgtcgcatcggcgtcctcagccccgccccgcgcctaagcggcgctcgctgggagggcctggccatcttcgcgcggtggccgggcgctcccggggtcccctgcctgtgccccgttcccccatccagaacctgggctggaggtgctagggagctctgggagcctgggctgcacgcagggaagtgctctcggccgccggggtcacaagactccagggcttcacagtgcccaaggcttggtggacatcgagcccaccggggaatctttgccatcagcgccgtgttttgatgcccgcggcaaggaacaccacgaaataggtttcctgacactcaggtgaggtgccaggtcctgggttaccaaggtcaggtcaggtggtctgtacttgccacccctgggtcggctctctaccctgcttgactacatcacaggaaaaggctggaaatggatccggggcttgttgacctgtagctcatggaggctgaagaatttcctccttgaaggcagacctgattttcctcctcacggaagagtttaggccagtcatagggtgtttttcttctatttattttatgttatgttatgttatgttatgttatgttatgttatgttatgttatgttatgttatgctattttattttattttagagacagagtctcactctgttgcccaggctggagtgcagtggggccatctcagctcactgcaacctctgcctcccgggttcaaatgattctcctgcctcagcctcctgagtaggtgggattacaggcgtgcaccaccatgtctgtctaatttttgtatttttggtagagatggggtttcgccgtgttggcaaggctgatctagaactcctgagctcaagtgatccgcccgcctcggcctcccaaagtgctaggattacaggcgtgacccactgtgcctggcttcttctttagtaaataaactattttatcaaagtataatatatcttcagaatagtgcacacatcttaagtgtacagttgggtgaattttcacaaagtgaacacacctgtgtaaccagcacccagctcaggagatagaattctcctgaatgggagttagtgtttaatggtacagagtttcagttttacaagatgaaaatagctacggagatggatggtggtgatagttgtacgttataaatgtattgaataccactaaactgtacactcaaaaatggtaaatggtaaatcttatgtgtgtttcaccacaatcgtaaaaaaaaaaaaagaaaaaagatcagctgggtgtggtggcacaagcctgcagtcccagccatttaggaggctaaagcaggaggatcacttgagcccaggactttgaggttacagtgaactatgattatgacactacaccccagcctgggatcccatctcaaaaataagtttaaaaaattttagaaaaagattcccagccacttagaattctccacatgccttcccaaagccaaacactatcttgattcattttgccagtttttaactttattattatttatattttatagagacagagggtggctgtgatgcccaggctcgtctcaaactcatggcctctagtgatcctcttgcctcacccttccgagtagctgggattccagacacatgaactttatttttatttttattttttgagacagagtctcgctctgtcacccagactggagtgcagtggcgcaatctcggctcactgcaagctccacctacccagttcacgccattcgcctgcctcagcctcctgagtagctgggactacaggtgcctgccaccacgcccagctaatttattttttatttttttagtagagtcggggtt[142 bp omitted]agaatcataaccactaaagatatccacatcctaacccccagaatctctgaatatgttaccttgcccaacataagggactttgcagatgtgatttagttaaagacattgagacagggagattatgctgtattattcagtgtgcccagtttaagcagaagagtcctttataagagggaggtggaaaaggtaagagtgatgggatgtgaaaaagactccaccttctgttgctgactttgaagattgacaaagaggccatgagccaaggactatggggtggcctctagaaggtgcaaaagacaaggaaacagatactcccctggaacctccagaaggaacacagcttctaccaatgctttgactttagccagtgatccttgtcagacttctacagaattataaaataataaatttgtgttgtttcaagcccattaaatttggggtcatttgttacagaagcaataagagacaaatacaggtatttactctttgtgtctggcatctttcactcaactttttttttttagcccaagcccatgacagtagatcattgtatttgtactatataacattccattacatgaacatgccacatattcttcgtcaactgttgatggacatttgtgttgtttccagtgtgggcgcttatgaatactgtggctatgaactttcttgtacatgtctttgggataaggtatgtgcatatttctcttgcacatatataggaatagaatttctgggttatagggtatgcatgtatagtggctgctgtgatgtatccccaactctttcagaacgaaaggacctattcccttagctgctgggaggacccctggctggcagtcccagctgccagggctctgtgcaaactagtctcagctgaaaagaacttatttggccaaggtcacacatgcctcctaggaacgacctgtgtcattcaatgactggttgatatgtaagggtgggggatataaaggccccctcccccaatgatacctggaatagctttgaagggtcaccctggattcaaagttcttcagggatcagaggaggcttttgcagaggctacataccaacccagcttctcccccaccaaccctgcttccctccctttcctgcaggtgttgatcatgagagcactccctagtcaactttctttcttttttctccctctaatccaatatgattgatatccctaatcaacttcctgcatgctaatctccatctcaggatcagctgcctgggaacacaacctacaacagcttacgttattcagctttcatggttatcaagcagtcttttttttttttttttccaagacgcagtcttgctctatcgcccaggctgggtgcagtggcgcaatctcagctcactgcaacttccgcctcccaggttcaagcaattctcctgcctcagcctcccaagtagctaggactacaggcatgtgccaccatgcccagctaattttgtatttttagtagagacagggtttcaccatgtttcccaggctggtcttgaactcctgacctcaagcgatccaccctccttggccttccaaagcgttgggaattacaggcatgagccaccacgcccgggcagttttctaaagtggttgtcgtcctatgtattccctccagcagggtgagag[132 bp omitted]ctacagcctcaacctcctagactcaagcaattctcccacctcagcctcccaaagtatctgggactacagccgtgtgtcattatgcccacctaatttttatttttaaatttttttatagaaataggatcttgctatgttgcccaggctgctcttgaactccaggctcaagtgatcctcccaacctcggcctccccagagttctgggattataggcatgaaccaccacgcctggccttttttttttttttttttttccctaaagccactctggtgattgggtagtgatacctcattgtggttttcatttgcatttttctgatggctaaagaagttcagtaccttgttgcatatttattcagttatttgtgtatccttttttgtgaattacctggtcaaatcttttacccacttttctactgggttgcgtgcctttttcttatgactatgcagatgttctttctgtattctggatacaagtcattcgttgggtatatcacaacattattcagagattctcaacggcaccagcacattagggtcccaataaaaatgagttacgtgaatgcttgagtccgaacactcttctaaggaaagaatgcttggacagatgcaagtgtgtatagttttaatgggtataattggatataggatatgggtcccaaggaaaggaaaacagaaccttgaatgcaggtaacacaccctcaaactttgccactttcagcctgtggtttctagccacaagcacttaaacacgcagttcccaaaggcaactgtaaattagtattcattcattcaaagaatgtcgatggaaggtatcaatga[131 bp omitted]cctcagcctcccgagtaggcatgcgccaccatgcccagctaatttttgtatttttaatggagacggggtttcgccatgttggccaggctggtctcgaaacccctgacctcaggcgatctgcccgccttggcctcccaaggtgctggaattacaggagtcaggcatcgcgcccgactggtgagcagcctgttctaggaagtgagtagccagctgtgaaagagaaacaatattcttgcttccaggagatctaggagagacgacaacttctaaaatagcataattttagacatgagacataaactgaataggtcgtagggggaagtaggacgaaagggttgatcaagcaattcccagaccaagacaccaggagggtcccgccctcggccccgcctccagctttgcatacatctcctgattggtcggcggcggcaggccccaccccgcggagccgagctccgcaagctgcaggcgggctccgccaagatgcagcggcggctccggttgtcgccgggcgggccaggagcagcgcggacccgagccgggcagggggcgcccgccacggcacccgcgcgctcctagcgccccagacccgcctgcgggcccggatcctccttgccactgtcccacccgccgtccctgccactccaccctttgtgtcgccgcagcccggtgcccccggctctgcgggaccccggccgggccggaccctggcaaagcgccaggccccgcgtgggctcccggcgagcggttgatggcgagggggcgcggcgcgggctctgtagcccgagttcccgacgctggaggcccggcccgcctcagccgcattgtcccgggccgcgcgcaccggccctgagctgcgccgccgcagcacccgcccgccgcccgcggggccatgcggagagccgccgggatggaggacttctccgcggaggaagaggagtcctggtacgaccagcaggacctggagcagggtgagcgcgggggcgaccgggacaggaaggcggggagcgcccggtgacccctgtccgcttctccattgttgggcgctatcaccccgggaggggctgggctggaccgggcgcgcccgactcggaggagggacgcgtctggagaaccgggacgtggagagagggggcgctgccggagaagacgcggaccggacgggcggagacctgcaaaagtggggggcggggggcggtcttcctattttcccagacgaccgggcatccgtcatccagctcgcccaccccgtcctggaggcagcaactgctcggccgcccctggtattgttacggggcctgagcgctagctaggagtcttctgaggccgggaggcggctccttcgtcatgttttgctgggagggtggcttgtgtgtagagggaagttatctcacgccaaatccagcagcacccgtccctgacaggaattatgagctctaagactcctagaaagtttccctaactcgcttcctactcagggagaagtggtaccgcgtctttgctggtgaagaagcagaaagtcaagtctcccatctgccttcgagagtcaggagtcgcttagccctcccctgcccggtccccttgcaaatggctcatggtttggagggggtcaggttcgggaatcccggccagtgtgccaggcgagagaccgaataaagagggatacatctccgctgcccccagttgccatctgaggacagaaagggcgactggaagggggttagaagctggtgatgaggtggccgaaatgacatcactgggagtggggggtggggctgttgggacagaaaggaagaggaggcctgctggagtggagtcagttctatcctctcctcccctaagatgcctccttcttggatggtgagagctggaaggggcgaggaaacatgtccagggagaagtgaccttcccatggcctccagcaagctggggggtgtggacataagtctgctgcagtttgtgccattgtggcctgctgtggtgtgcccacaccctggtctccatccacaaggctccagagggctggctttgccctgatgtgcagcagctatccggattctgaagcccctgacctacttccccacatggccaagactggctggcagatgaggctctgtccttgtgctgaggacaagggttaatcatagcctcagggggaccagggtgggactggggatgctggactaggccctgccatggtctgtgccctggactctggcctcagcctccttggctgaaatgagatacagctcctctcaaacacacacacacacacacacacacacacacacacacatccacacattgtgacaaccccctctcccatcctgggcagtaaatttttccatgaacacctattaggctccccttaagtaccagacaccatcctgggagctaggaatagtcacagccctgaccctgaaggtataccctggcaggtgaaggaggcaggcttgtaactaagtgtaggtggcacagtatttttttcttttttctttttatttatttatttatttattttcagacagagtctccctctgtcacccaggttggagtgtaatggtgcgatctcagctcactgcaacctccatctcccgggttcaagtgattctcctgcctcagcctcctgagtagctgggaccacacctggctaatttttgtatttttagtagagacagggtttcaccatgttggccaggctgctctcaaactcctgacctcagatgatccacccgccttggcctcccgaagtgctgggattacaggcgtgagccaccacgcccggctggtggcacagtattatgggcagtggggagggcttcctggaagagccaggcttagaaagaaagatcagaaactgagttcttgagaagatggttttcagggaggccgatgccaatattgttgctgtctcacttaattcctgcacccctaatgaaggctttggcactgttcctggcccagaaatgggaaaggagccagggcatagaggtgggagatgcgcagagatgtgcagcttcttgagagagagaaggatctgagactccagctgcgctgggtggccgtgctctgggctgccgggagggatgggcccggcaggcctctgcttctctggccctgctggtctgcagctgttggcctggcctggcagctccaatggtagccaaaggccaggaaccaggagggaaagcagaaatgagacagaataaactggagcttcctgccaaaagctggatgtctgcttactgtgggccaggtactgtgctgagcctgaggacataatctctgccctcagaggactccacgttacattagagaagacagaaataggaccaaactcacaatggcgtcagagtgaggggttctgcagctgtaggcccagcaacggggacagcagagacttagaaaggtttatgccaaggcccttttgagctggaggctccccaggagagggagggaagaaggcattccagggggaagcgatgcttgtaccaagtcatggagcgacatgagaaggctggaaaatagggagggaggggctgaaggaagcatcagacacgggttctgtggggcattcccgtgggccctgcccgccctgtgccccaggggccaggcatggagagctggatggtgggacggagcacgggccaaaggccagccatattgggtgtcaaaggcctgttgcatctcccaacccacaaattctcttccacccagctgctccctggttgcctgtgagtggcccagaaatggttttctcagccagccacctggtcttccctcctgtctgtttcctcctgcccaaagggcaggccctgattccactttccagaagcttgactgtagagatcctgtttggctttgatgctctgtcctggtggaaagcagccgtgggacaagtgaggtcctagattctcgctgtgttccctctgcccactgccacgagcatttataaaaatagaaaaagccagctgggcacagcagctcacacctgtaatcccagcactttgggaggccaaggcgggcggatcacctgaggtcgggagttcgagactagcctgaccaacatggagaaaccccgtctctactaaaaatacaaaattagccaggcgtggtggcacatgcctgtaatcccagctactcaggaggctgagccaggagaatctcttgaacccaggaggcagaggttgcagtgagctgagatagctagcgccattgcactccagcctgggcaacaagagca[358 bp omitted]ttaagcactggcactccctctttcggcccacattcctcccctaccttggaccaggcgtggcaggccctgtgcgttcctctttccaggctgagaggcagctgctgagtcacagatttgaagtccttggtacccgtgctgtccccgcctgcctagctgaccttgagtcctcagcctcaggagagctctgacctggcaacgggagggaggtcctgcctccaccctggttaccccaaaggtgacctgaccctgattctgtggacccagagtggctgacagtcgtgccctggagctgagaacaggacctcacagccctgccaggtggtacttgtgtccacagcctggagcccacacccctacctttgtcctccctgaaaatgtcccctctccctttgctgagtctctgctctggaatctgtggtgcccgagccagtgagggacagtgggatttctaagtttcttttcaaagacaggccctgggttccccagacattcctcctcaggcctctggggcattgcttcatgtaaaaccactaaaacctcctgaaggagaccccagaaaaccctggggtccaggcaggggaggtgccaacccagacttaatgttgttttttttttttcttttgacctgcacagttcaaacccatagcccagacttagtaccttccctcagcttggtccggtgtgtcccattcatccagctgtgacaggttgttactccactttcacttcctgtctagccagctcccccattctcccgttcccaggcctctctcctctgagcctggagccatcacccaccctctggtagctggtgtcttctccctagtacttggctccactcagttccctgctctgcaacttctagactattccctgatccctcctggcagctttgaccagcttagcttgcgctgtgatccagtttccctaaaatgatctgagacctgcctctctgcccccaaacagcttctattgtgtttctctttctacctgtccctgaatcactaggtggcccaagtcgattcactgccttcaaagggcaacctttgatgtctctggtttatagggtggtataccaccctggcctgccagcattagaaatctacacacagcccagacactaacctggaagtggggggtatgatgttgcactgcacttggcctttcttcactcacctctgatgcagtggctttgcactctagttaagctgcaggggctccatgaaggccacttacttggagcatgtcctccgacacccacggcaggaggtagaatcagtagcaatggcctctttgcagaccatgtaacagtttccaagggggaaaacatttaggagagtagccctctgatctctttcatgtatatctgaactgctggatactgttcaggatgagctaaatttgagtcccactatggaaaacaggaagatagcatggctgtctcatcacaaactgaaggtgatcttgcccggctcctgagtcctgagttactgccatgcgcacaatatagtacagggctgtagttcaatcttttttttttttcaagacagagtcttggtccatcgcccaggctggagttcagtggcacaatcttggctcactgcaacctccgcctcccaggttcaggcaattctcctgcctcagccttctgagtagctgagattacaggtaagcaccagcacgcccagctaattaatttttttgtagagacaggggtctcactatgttgcccagtgcaatgatctttacatcaaactttacaatttgtagatacctccagacttttgcccaactgacaggtcataaattcatacagcatatatccgcattcccttactaggtttatgttatgtaactagttttttcttggcatcctcatcagaaggttaattgctcaaggctaaaagttcttacctatgatttacatgatttggtttctttgttgttgttgttgttttcaatggctgaggaagatgtttgggaaagctgcctttgttttttcaggctaagttactgcagccttgctctaggatagcagctttgcactccttctccagatgacacagggccctcctttggctaaaacccagccctggaggctccactttggctgtttcaaaacctcacctctgtgcacaggatcagactccggatttgttcctgtggggcagttcagcctttatgtccaggcccagtggctggtctggcccctctgcctctcacaaggcaatgtcagttctgcccccagcttggctgaaggcccaaggctctgccctcagctgcccaccaagagtcactgcttgcctgggctcatcccaaaggaaaacttccaccccaggtctaggtttcttttcaaagacatcccttgggctccccagctattatttctcaggcctctgtccaatgcatagcaagggctcagccgaaacaaccgtatctaggaaactttctgtccgggagtatagagcctatccgtcctccagagaccctagaactatcactatgtctaaaaagggaaagcagtagagaactggatccctgaaccacatcatattggccccagtagagttgcctttatgcatcttgatctgatttacatcgtcagcctagattgagagctgttttaagaagcagcctcataaaatgaaacagaccagtgctttcctggacagtcttttgacagaatgcctcaagaaggcctaccttttgtcccaggaattgtatttctaggaattctgtatctaggcctaccttttgttccaggtacctaggcttaccctttgttcaaggaattctgtgtcctaaggaattgggcggtgatttgcacaaaacgttttgtacaacaaagttaattagtttcattctttttttttcagagatagggtcttgctttgtctcactggaatgcagtgttgcaatcatagatgactctaatctgaaactcctggactcaagcagtcctcccacatcaacttctctagtagctgcgaccacagacatgcaccaccatgcccggctaattttacaatttttttgtagagatggggtctcgggtagggcgcgatcccaacaccttgggaggc[134 bp omitted]gagacaggagaattgcttgaacttgggaggcagaggttgcagagtgagccaagatctcatcactgcactccagcctggcgacagagtgagactcagtctcaaaaaaaaaaaaaaaagagatggggtctcactgtgtttcccaggctagtctctaacttttggcctcaagctatcctctcacctcagccttccaaagcactgggattacaagcatgagccactgtgcccagtctacactttcttttttttttttttctttttgacaatgtctcactctgtcacccaagctggagtccagtggcacaatcacagctcaccaagtagctgggactacaggtgtatgccaccacaccccactaatgttcttattttttgtaaagacagggtctca[142 bp omitted]tgtttgtttgttttgtttttttgagacagggtctctctctgtcacccaggctggagtgcagtggcacaatctcggctcactgcaacctgtttcccaggttcaagtgatcctcctgcctcaacttcccaagtagctgggaccacaggcacatgccaccacgcctggctaatttttgtttttagtagagacagggttttaccatgttggccaggctggtctcgaactcctgacttcaagtgatccaccctcctcggcctctcaaagtgctgggattataggcatgagccactgcacccggcctaaatcaccagtttttaacctttctgtactgtttgatttttttacaccaatcatgccttatgaaaaacattaaagctattttaaaaagaaaacagccttgtgaaactcagcctcagcctgctctaacgacctctttgaggacccgctctctcccacccttctccgtctctggattaagctgcctaaatcttttttttttttgacagatttattgagatttaattaacacacaatacaattcactcatttaaagtgtgcaactcaacagtttttattatattcacaaagttatgcaaccatcaccacaatcaattttagaatatttttatcaccctgcctcgttttagaaacaaaaaacaggccaggcacagtgactcacacctgtaattccagcactttgggaggccgaggtgggtggattgtttgaggtcaggagtttgagaccagcctgaccaacatggtgaaaccccatctctattaaaaatacaaaaattagctggatgtggttgtaggcgactgcaattccagctacttgggaggctgaggcaggaaaatagcttgaacccgggaggcggaggttgcagtgagccgagattgccccactgctctccagcctgggagacaaagcgagactccgtctcaaaaaaaaaaaaaaaagaaacaaaaaataataaatatatttaatatacatatgtgtgttgttgggaggattgtatccactccaaatgtctagctatcatcacacaactcagacccaccaagagaatttttagggattttagtacctgccgtttccttctaactccttctctctacccgcccatcccccacaacatccccctaaaaacagacagattccctcctagcctatctgatgggtcctcatttcccttggactggggtcagggagggaaggttccaatcctacagggtacaagcaccagggctgttgggggaagaggatgtttctgctcctcagggaaagaaggtttgagagctgggcacatgtcactagggtcaaatggtacccaaccaggagcccgatacctgaattctccccctagcgtggacataaaccagctgggtgaccatgggcaagtcactctgctgtcctgctcattatccataaaatcaagaagttgggccaagaagttctgaatcatcttccagttttaatattcagcaagcccttctgctctctctgcctctcagcaagctcctattcacccttttctttctttctttctttctttctttctttctttctttctttctttctttcttttttttttttgagactgagtctcgctctgttactcaggctggagtgcagtggcacgatctcggctcactgcaacctctgcctcccaggttcaagcgattcttctgcctcagcctcccaagtagctgggattacaggcttgcgccaccacacccagctaatttttatatttttagtggagataggatttcaccatgttggcctggctggtctcaaactcctgacctcaagtgatcttcccactttggcctcccaaagtgctgggattacggcgtgagccaccgcacccagcctcctatccacccttcaaagtccaactcgaaagctgtccatttgcctgagcctcccggggagagtgaagctctcccttgcccatcaccccacggcaccttgcccctatgtccgtccatgctcttatcactcacttaatcttccaaaaagacaaattatgcactgattctgtcctagatactgtcctgggtcctggggatattcatgagcaaaacataaaaatccctgccctgccaggtgcggtggctcacgcctgtaataccagcattttgaggccaaggtaggagggtcgcttgaggccaggagttcaatactagcctgggcaatataacaagaccctgtctctacaaaaaaaatttaagaattttagcccaggtgtggtggcttatgcctgtaatcccagcattttgggaggcctgagatcaggagttcaagaccagcctggccgacatggtgagaccccctctctactaaaaatacaaaaaattagccgggcgtggtagtgggtgcctgtaatcccgg[168 bp omitted]aaaaaattagccaggcatggtggcgggcgcctgtagtctcagctacctgggaggctgaggcaggagaatggttagcgtgaacctgggaggcggaggttgcagtgagccaagatcgcgccactgcactccagcctgagcaaaaagagcaaaactccgtctcaaaaaaaaaacattgtactattcctgtagtcccagcaaccgatattatagtcccacgcctattcacaggcatgatcatatacactgtagccttgagttcctgggctcaagggatcctatcccaggcagccgtattgcaccacctttcttttttttttaatagagatgaggtctcactatgttgccctgggaggctgagggaggaagatcgttgagcccaggagttcaaggctgcagcacatatgatcacacctgtgaatactcactgcaccccagcctgggtcccatcccttaaaagaaaaaaaaaactgccccatgagctcacagttagttgggggagctgaaaaagataaaggagtaacttgcttgggaaattagatggtgctaagtgctaaggagaaagatgaagcgggggagagactgcagggcagggaacagtgtgactttgaatcaagtgattggggaaagatctagagaagttgacaggcacagacttgaaggagaagagggaacaagtcctggaagtatcaggaaagaatattccgtgcgtgaggctggcttctgggttgtccacaccactctctgctgtgttgacttcctgttgtcttcatcaaagcttttttccgtggtattctaaaattaggccagcagtggggctgggagggcatctgtgttagtcccttcctggctgtgatccgccacactcactgtcagtattaaggcccagcagcctgttgataagctacgctgtctcaccatgcgctggtgtggaaacagggcccagccagcatgcctcaaggtagatggaatccccactggtcagagaagaagccatgcggacactccagcttggcctgggcacagcactgactcctcacccgctagtctggctgttaagaggagaaggtgcactgccttccagcctaggaggaggacagcattttgtatttgttccactgatgcagcttagaaccacacccctgagaatcgtggcaaaactttcacaacctggaaaatgttgaaagcaaccattcctatttttgtttgttttttattacatcttgcacacacacacacacacacacacacacagacacacacaaaaagaacattccaggcagaaataacagtgcaaaggcttagctcctggcttacctctcctcccaggcctggaggctcccagtgtcttggttacattggggtcacctagagtagatgctcggaacatgaatgggcgtcctctgcctttgttctcatgctcgtgtttctcctatcctagacttgcacctagctgcggagctggggaagactctgctggagaggaacaaggagctggaggggtccctgcagcagatgtactccaccaatgaggaacaggtgcaggagatcgaggtgagggccctgcatgtgcttgcccacacccctcgagggccccttggcctgtgtgtgcctttatgcaacttagaataaggtgccagcttatcggacacagccttagcccaatagcctggtacagttcacaactgtgctatcctgtacaaggatagcacagctatctcaggcagccctattgcacaactagattttttttttttttaaatagacaccaagtctcaccatgttgcccaggctggtctctaactcctgagctcaagtgatcctcccacctcagcgtcctaaagtgctaggattacaggcatgagccaccaggcccagcctgaaccaccatttttaagccccactcagctgaagacaaatacatcaaagcaaacttgtccttagaaggggagaaggggctgctggctcatgcttgtaatcccagcactttgggaggccaaggtgggtgaaatacttgagcccaggcaacatggcgaaaccttgtctctataaaaaatacaaaaattagctggctatggtggcataagcctgtggtcccagctactcaagaggatgaagtgagaggattgcttgagcctggaggttgaggctgcagtgagccgtgattgtgccactgcactccagcctaggcaacagagcgagaccctgtcttaaaaataaataaa[140 bp omitted]ctgggactacaggcgcccaccaccgcacccggttaattttttttgtatttttagtagagacgaggtttcactgtgttagccaggatggtctccatctcctgacctcgtgatctgcccgcctcagcctcccaaagtgctgagattacaggtgtgagccatcacgccgggcataaaaaagattttagaagttaaaaaaaaaaaaaaaggccgggc[137 bp omitted]gtggtgggcaccagtagtcccagctactcaggaggctgaggcaggagaatggttggcgtgaacccaagaggtggagcttgcagtgagccgatgtcgcgccactgcactccagcctgggcgagagagcaagactccgtctcaaaaaaaataaattaattaatttaaaaaaaaaagaggctggcgtggtggtgcatgcctataatcccagccctttgggaggcagaggtaggcagatcacttgaggtcaggagttcaagaccaacctggccaatatagtgaaaccctgtctctactaaaaataccaaaattagccaggcatggtggcaggcacctatagttccagctactcaggaggctgaagcatgaaaatcacttgaacccaggaggcagaggttgcagtaagccgaaatcatgccactgcacttcagcctgggcaacacagtgagactctgtatcaaaagaaaagaaaagaaaaaagacaaaaaaagaagtaggagggtctaggcagagacatttgcccctgcccaattctaaaaagttactcaatgtccttccacccccagtacctaaccaagcagctggacacgctgcggcacgtgaacgagcagcacgccaaagtctatgagcagctggacctgacagcccgggacctggagctgaccaaccacaggctggtgctggagagtaaggctgcccagcagaagatccatgggtgagggcccggctgagggctggggggcgggcgagggagagccccagggctgagtgtacacaggggcccatggactgatgggtgtgacttgtgcacgtctccctaggaaccggggatgggagtgagcttgtccttgtcgattttgtgtggtttaacattcaggccgcaaccttgctttaagcaccaactatgcaccaggctcttctttagacactggggatgcaacgatggggaaacaaagacattgtcctgccctctaatacctcacagcctggaagagaaggcaggcatgtaaatattttatggcagtgcaggacaataagtgatagaggagtgacaaggaactgaggtggcacagaggagaagcgatcagctcgcctgagaggtacaaaagaagggcgggtccttgggcatgcatagaattccccatcctacctcaggaccagacagcggctcaagggtacctgtctgcctcctacccaacgtccctccatcttcagggagccagggctgccgtgaggcaaactggccccatccccttaaagtccctgtgtgtccaccaccccgcccccaggctgacggagaccattgagcgcctccaggctcaggtggaggagctgcaggcccaggtggagcaactgagaggcctggaacagctgcgagtgctccgggagaagcgggaacgcaggcgtaccatccacaccttcccctgcctcaaggagctgtgcaccagcccccggtaggtgagagcactgcttggtgtctctgggattgccagccatgggaggaaggagaggcagcaggcagcagggtgcagttggtgcatcatccaggccatcagagagactggtcctgttgctaatgacagtcacagcagctggcgtttactgagccctggctgtgtgctgccactatgctgatataattcttattgcaacactgttgggggtgttttattatgcctactctccagatgataaaactgaagcccagaggttgtgtgtcttatccaaggtcacctgtttagtaagaggctcagccagcatgctaacccaggaggggtaacccactgtgcttttcagttcccattaaatctaacactagacaaccacttaataatggaaaaatacatgtgtcatatgtagtgggtgtttcaataagggtcctggcaggaaacagtctcttacacagagtaatggagaagttaaatgaagaagaggtgtgggcagggggtagggaaaccacagggacactatagtgccccagggttgcagcagagaggagctgccaccagccctaggcctcaaagcgcaagggggaagggaggttaccggcacctggaaggtatggagaaggctgcctggtcaccattaaccatggagagcccaaagaagacacaccccacggcctctgctcccccctcggacctctagccagtgcctctcatgggccaagctcaggagagaaccaggcaacctgacagaggcggtccgtagtggtcagcctccgggggcagagagcagggggagaagggtggaggagggtggagagccaacggagaggggcaaacaatttcagcccagagaacaagagagatgtaagcgccctggctgggctgctcggccttggccgtgcccgtgaccactgccctctcctccgcccccaccccgctgcgactctcactacccgccaggtgcaaggatgctttccgcctacacagttcctccctggagctgggcccgcggcccctggagcaggagaacgagcggctgcagaccctggtgggggcgctgcgctcccaggtgagccaggagcggcagcgcaaggagcgggcggagcgcgagtacaccgcggtgctgcaggagtactcggagctggagcgccagctgtgcgagatggaggcctgtcgcctgcgtgtgcaggagctggaggccgagctgctggagctgcagcagatgaagcaggccaagacctacctactgggtccggacgaccacctggccgaggccctgctcgcacccctcacgcaggcccctgaggccgacgatccccagcccggccgcggggacgacttgggcgcccaggacggggtctcctcaccggcagcctctccaggccacgtggtgcgcaagagctgcagcgacactgcgctcaacgccatcgtggccaaagacccagccagccggcacgcgggcaacctcacactgcacgccaacagcgtgcgcaagcggggcatgtccatcctgcgggaggtggacgagcagtaccacgcgctgctggagaagtacgaggagctgctgagcaagtgccggcagcacggggccggagtgcggcacgccggcgtgcagacctcgcgccccatctcccgggacagctcgtggagggacctgcgcgggggtgaggagggccagggtgaggtcaaggcaggagagaagagcctgagccagcacgtggaggccgtggacaagcggctggaacagagccagcccgagtacaaggcgctcttcaaagagatcttctccaggatccagaagaccaaggctgacatcaacgccaccaaagtcaagacgcacagcagcaagtgacccttctccggcctgcagcctcccccagggtggaagccgtggggtccctcaggcctgggcggtgcagcttccagagagcgagcgccctttagcggcctgccaccacagcacgcggcctcctgatccggaagcacgcagcatgttccctgctgagcggaggcagcccacctgtcctgcctcccaggagcccttggccacctcgcgccagcccaaaggcgcagctctgagttcaaagccaaatgtccccactaccccagggatcccccagctcccccagcccctggcttcctgaccctgcgcctcaccctcagactggtgaccaggcttctgaaagccattctggatcagttggctttttttttttttttggttaagtttgttttttctaagagatttgcaatgcaaggtctccttgaccccttgccacaactggaaacacttgaaaggggaccccagggccagctgtttcaggggtttcctggaccacccactgcttctccccaaccctgatgcgctgacattcccttagcaccagctgtcccacctccagggtcctgaccaggtcagagatgtcccctgccatgcagagcaggaagcctcagctgggcctggagtgtccctgctccagccctgccagggacaggtttctccctggatactcttggcccaccgcagatctgtagccagtcagaggaggaggagaaggagcccctcagcagagtggtgcagtttcgctcagagcttgtctccttggcttccaaccccagaaatgcctgctgggccttaagctttccaggggccggggcagtggggagcccccatcccttcacaccgccaccaactaaccaagcttggcctctgactcccgtctctgtgcttgcccccatctcagggaccatgatgtctcagtcactccacgctccccacaggccaaccctggcacaggtcatgtctgcagcccccagaatgttctggacatgcaccaccagccggtggtcccaatgtccacccctgcctccccttcactggggactggggttttcgccccatgctgcatcgtgttgtattgggatggggctgaggaacatgctccctccctccctcccataaaatgcctgctcttcacctcccacctttgtggggggcttttgaggacccagctgcgtcaggagttttgcttcaagatgtcagaaagtcaagttcagctaagagacacccaggtccccagcttgccctgagcagcccttcagggcttctggttccttctgccgcccttcctgagaccttagaaaccagaagagccatacagtcagtggaaggcgggggggccctggcctctgcaccgggatcccagtgggaaccttcatgccttatttatttctaatgggtaaaggggttttcttaccaagcatccctgacctcctggagacaccacctgctttccgggcggcactgtgatgggagctggtggcgactgagtccttctgtacgtgcaactgggaaacttttgtcctttgaggctaggcagctccctgccctccgtgtgtgtctgttatctgggggagaggagtgtggaagggttgggggaagagctccagcctgtctgctccccagctctgtagtggcagaccagcgtcacctttgaagtatacgtgagagaaatatatttacaaatgctttattctcttctttaataaaaaatgcaccagtattctaaaagcaaaaatggcccatctctgtgcatctcacacacctgcctcgcgtcacgcccagccatgggagagggtaacatcctgtgtcccacttccctgagactgaacagctccaaatagcaggctctggcagaagtttctatatttattgagggccagctagggatacatggtgaacaagccagcagggcccctcttcccttggagtttatattctggtgtggggagatccacccaaaataaacaaacaaaagatacggcatgatggaaaaatcggggcaagagggtagtgctacctcagctagagcacgtgggcccaacagggtgaaccaagttaaaaaaaaaaaaaaaatcggcctggcgcggtggctcatgcctgtaatcccagccctttggaaggccaaagtggattgctagagcccagaagtttgagaccagcctgggcaacatagcaagaccccctttctacaaaacattttttgaaaattagcagagcatggtggtgtgcatttgtagtcccagctactcaggaggctgaggtgggaggatcacgagcctgggaggtcaaagctgaagtgaactatgatcataccactgcactccagcctgggcaacagagcgagaccctgtctcaaaaaatcatatctagatatataaatacagcacatgaagagatatacagtgttactaaaattcctgggggagcaattcggagaaaatgtctaaataggctctttgaggtaggaagggggagcgatcatggaaaaaaaagattgagaaatgctaagcgagggtggtcagggcacctctggagaggtgatgatgaagctgaaaccagaaggctgaggaggaaccaacgggaagataagtggaggcccagggagcagctggggcagtggggggtggccagaacagagggtggaggccaggctcctaagagcccggaaggttcaggggagctcgggcctcctaagtgcaatgagacgccacggcaggaagtccagggccagactgatgccctgaaggaccatgagggatggggaagttgacctgcccttggtgagccacccattgatgacacaggacagtcacaggaatgacaagagggccatctcctggtgtttttcaagctgataaaccccatatctctcttccatatacatgaaaaacctcaccactcccattcttcctcagatatctgtctcctccccatgttatacagaggacggtacatagaggggttcatcttctggaggggtccccatcaccaagattacaccagcctccctcttgttctggaagtgccgtcaatccgttgggttttctgttttcctcaatgcaaaatgataggccgggcgaggtggctcatgcctgtaatcccagcactttggggggctgaggcaggcagatcatgtgacatcaagagttcgagaccagcctggccaacatggtaaaaccctgtctctactaaaaatacaaaaatcctagctacttaggaggttgaggtgggaggatcacttgaaccgggaagaagaggttgcagtgagccgagatcgcaccactgccctccaacctgggtgacagagcaagactccgtcaaaaaaaaaaaaaaagcaaaatgatagcggtttttcaaacttcccatgctccactcagccctctccagatttagtaatgtccatcctgaacttaagaattgctgtccaagaaaaaattagccaggcatggcggtggccgcctttagtcccagctactcgggaggc[136 bp omitted]cctagaaacaggactgtggatcctgatcaaagggggcacctctagggtatcttccttcgcctcacactgccaacgctacccaccccttctcgcaccagcagcctgggtggacctttccgatgggggacttccaaaaccagagaggaaaatgctcctgaatctttgaggggtttcttgctagcttcactctctcgtctccagacaaaaaaaggcagctctgtggactccagttccaccagcccacacaacctgagtctgtggaaaagcttccaaagtcttctaagggaggtagactcaggggccagctggaactggggggaaatgcaggcttctccccaaaactccttccccaaatgtcctgatggggaacaacttcccttgaactcaggaggggaggaaagtgtggtgtggggctgggcatggtggctcatgcctgtaatcccagcaatttgggaggcggaggcaggaggatcacttgagcccaggagttggagaccagcctggccaacatggcaaaaccccatctctactaaaaacacaaaaattagccaggcatgatggtgtgtacctgtaatcccagctactccggaggctgaggtacaagagttgcttgaactcaggaggctgaggttacagtgagcctagaccacaccactgcactccagcctggcgacagagtgagactcagtctcaaaaaaaaaaaaaaaaaagtgtggtgtggcaagcccaaggctgggccccaaactgctgtgcttagtacatcaactgaacagcatggggcttttacaagggcagcgtgcaagtggctgttgggttttcccatcctgttgtcacctgtcgtcaccaggatggggagcaggtggtggtgaccacatggagcagtcacacctgagagacgaaggaagccgtggcgtgaatccagccacccttttctccctcagcctttttttttttttttttagacagggtcttgctctgttgcccaggttggagtgcagtggcacaactgtagcttactcggcctccagctcctgggctaaagtgatcctctctcttcagcctctccagtagctgggactatgctggctaatttttttttttttaattttttgtagggaccaggtcttgctatattgtccaggctggtcttgaactcctgggctcaaatgatcctcccacattggcctcccaaagtgccgggattacaggagtaagccaccatgcctggcctccctcagctttctaaaccgccctctggatgcatttctttcccttcttccctcctttctttcccttcttccctcctgatcaccactttgtccttgctctgtggacagatactccctgctgcagggagctcctccccgccccccggcccctgccccattctctcctcccctgaactggcacccttctcctctcccagggccaaacccaccaccccacttagggagggcagctagccaaacagacctgcctctgccctccctggggatcctgagctgagagctggggggtggcctcagttttaggggaccaggcagataaggggtagcaatgaaggaagtactttccagggagaggtgggcagctctgtgctgcccatcccctcagggaagaaggaaagagggttggaatacagctcgtcagactggatttcccactccagggctacagaggaaaaaagacaacagtaatcaggtgtctgaaagaaaagtgtcccttaaggaacctgcatgcacatagcatcccttagcagcagctaatttttgttgcctgctgacttcatgccaagcactgtgttaagtgttttatatgtgtttactatcctcaggaactttatgagatgactataaaatctccattttactgatgaggatacaaaaacttagaggtcaggttagtaattcaaggtcacatagaaatattcaaactcggctgggcatagtggctcatgcttattatcccagcactttgggaggccaaggtaagtggattgcttgagcccaggagttcaagaccagcctgggctggtagagacaagaaaccttgtctctacaaaaatacacaaattatccagcacatgccagtaatcccagctacttgggaggctgaggtgggaggatagcttgagccggggaggccgaggttgcagtgagccgtgatcataccagcactccagcctgagtgacagagcgagaccttgtctcaaaaaataataataatacaattttaaaatgaagtcatagtcacagttaccagcagttaggacatggacacatttttctatttttttaataaaaaaataaatatttaaacttagtcctgaccaatccaccatgcctcattgcacattccctatctacacataatgatgagttttgttttgttttgttttgttttgttttttgacggagtcctgctctgtcacccaggctggagtgcagtggcacaatctcagctcactgcaacctccacctcctgggttcaagcgattctccagcctcaatctcccgagtagctgggattacaggtgcatgccaccatgcccagctaatttttgcatttttttagtagagatgaggttttgccatgttagccaggctgatcttgaacccctgacctcaggtgatccacccaccctggcctcccagagtgctgagattacaggtgagagccaccacacc[215 bp omitted]gaagcaggagaattacttgaacccaggaggcagaggttgcagtgagctgaaatcgtgccattgcactccagcctcggcaacagagcgagagtcaatctcaaaaaaaaaaaaaaaaaggaggtcttctgacccagggcggtacagagaagaagaaaggggtcctatgtaggtcctatgtaggaccccctacataggaatagtaccccaactcataggccctatagaaaggcttgtgtctgcaagctcctcagctgccagaaatgacctctttcctctcttctcccatgaatgtcccctccctgaagcaccatctcggcctatagaaaaccaaggaggagaaagggaagactggcctcagcctttagtgcccatctttttgggagaacaggtggcccctttctggcctttctcccagggcccccattctggatagttcacggcagcagcaggtaagaggagcttgccagctgctcctctctccaccccagggcggcttgcctcattctctcctctacccacctcctctcccagaatccaggccaccagatggcccaagcaggctgtgtttatttggggccatggaaacctgcagcttccttttcctattgccttgggtcaggtgcagagctggagcccagcctcagagcaatgatgtcatggaaaggttctgactttattactcataaccccttagcccccgacctgagtgaatgcctggttttgctcctctgagcagcttattccagttgccatagagatgcgtctattccctttgaggtcttgggactaagtcaaacagcgcgggacccaggagactctcctcccaacccgagatagagcccgagatatgtcaattgtcacccctttctagtctgagcttataaagccagtgcttagaaagtggtttattccttcttaaagatttgctgtagccataatgcggagatggtaaaagcttggtgtgatgacaatctcctgtttcaatcagccagcatccccgggggcacatttttctagataattatgcttgttcctaaaaatagaactcttcattaagaaacaatcgctagcattactaataattatgaacatttatttagctttgtttccatttaccacatagcctctcaacacagtaacttaactaaggtttagctgttttcaaacactgcttgctctactgtgaacctttttcagaattggaacttgtctgtagttcatcccttaccagcgctatgaaagggttctagttagctggcagttctctgaattctctccctacctcccgagggaccccctctctcctggctggaagaaagcatcatcttgctccataaagctgaagggcgggggacgatgttccaggttttgcaaacatttctttcggtggcctgccttctcctcccatctggtatttgtcctgcagagctgctgggtataagccagtacacacacgtgctcagcggggaatttgctcataggctgccttgtaaaaagagcctggcgttcctaaaactcagctctaccagaacccaactttcaaaagtacattcctacagaattcattttatcagtactcatggggtgcccacgatgtgccatgttctgggtgctggggatataccagtgagccggtgccctcctggagctcacattccggctaggagacagcaattagacaattaggactgagtgatttttgtaaaggaagagaaaaaagataaattagagcagagtaaaggggctgggaagcgcggggcgggagatgccccaggctggccgggcaggcctcgctgctgtttgaattgggcagtgggcggtccaggcggagggcacggactctgaaaggagagaagtggtgtttctgggggccacaagatcggggcactcttccggtagcagctcgctctctggccaccgtcttccccagccaaccaggcctcccggaggcggccggccagaaagcatcggcgggaccccagtttgccgcctcccctcggcgggacctagaaactgcgcggaaccaaagctcgagggcggctcgagtttgcggaccgcggggaggaagcgcccgccggaagcagtcgcaagacctgagcatggcggccaccaggtgcctgcgctggggcctgagccgagccggagtctggctgctcccaccgcccgcacggtgcccacgccgggcgctgcacaagcagaaagacggcactgagttcaagagcatctacagcctggacaagctctaccccgaatctcagggctcggacaccgcctggagggtcccggtgagccgggaaggactggacggaaggggcgttttgtcaggctgctgggtgacgttaggaaccccaggcccattggccggatgtggagctacgtcggggggctacgtgatggtcgccgcgggagggggctggctgtctgcgctaacctggccgggagtggggtgctcgctgtagcgcgagatgtgcaggagcccggaaggccggctgggtatgcttctttcaaggctgccagcttttctacgttcgtgtccttggccctcaagaccaaattccagtcccaaggggaaatacgggcattctggccctccaaggcggacaataaaggcaagaggctgccaagttgtttgctaccctttgggacgttacagtgtccattgtctctagtaaccccaggacgcgcgaataaaacagcttctctgtcgttccttcaggatgcatttatttagccagctgtgtgcaggcattgaatcaagccccggagcaagagagataagacccacccaaacccattgagcttccacttacaggactggaaaagaatatccattcatttgttcattaattcactcactcactcaacaaaagctgtgctaggctaggggatggagtagcaaacaaaattgaaattctaaagcttgtggagcttatgttctagtggagggagacaagcagtaagtaaatgactaatatagaatgtgtgaggtagtactttgcagaaaataaagccaagaaggaagaagtagtgccagaggtaggaagtagggttgcaattttaagtaggattgtctaggaacgctgtcaatgaggtggcatttgaataacgacctggaagaagccagacagcaagtcatgagaatagggggcggatgagcatcctaggcagagggaagagaaagtgcaataacctgaaggcagtagcaatccccaggtgtggctcagcaggggtcaggagacaaagccaaagagagggatggctggggaaaggcctgttactaggacttaatggcctccagcctttcctctgaacgcaagggagacctattggagagcttgaagcagaatggaattatcttagttttacaaggatcactcagagagccttacagagaacagatagaggatgccaagatcagggagacaagtaaggagattgcaatgtagggcaagagatgataagcagggtggaagcagtaggagtcatgagaattggtcagatcctagacgtattttggaaagaaagcctgcaagatttgctaattgattggatgtgagaagtgagaataaaagaggaattgaagtctggggccttttttttttttttttttttttttgagacggagtctcactctgtcgcccaggctggagtgcagtgatgcaatctctgttcactgcaagctccgcctcccgggttcacgccattctcctgcctcagtctcctgagtagctgggactacaggcgcccaccactacaaccggctaattttttttttttttttttttagtagagagggggtttcaccgtattagccaggttggtcttgatcacgggcgtgagccaccgcgccaggcttttttttttttttttttttgagacagggtcttactctgtcatccaggctggagtgcagtggcgtgatctcagcccactgcaacctccgcctcctgggttcaagtgattcttgtgcctcagcctcccgagtagctgggattacaggcatgcaccaccatgcccgactcatatttttgcatttttagtagagacagggttttcaccatg[137 bp omitted]taactgagatgagagagtggcaatagcattcatttgttcattcattcaataaaatgtttattgtatatctactgtgtctactactacttgagtctagcatatacagccatgataaacaaaatacaggatctctctccttcatggagcttaattctaatggaaggagcagacagtaaacaaatagggaaaatatcaggtagtgagaagtagtgtaatgaataggccagggtgctgcaacaaagtgctgaggctacctcagattattagtaagggaagtcctctgaggcggcttaaggtttgggtccattagacatctgagaagagacgttgagtagcagttgggtatatgggtgtggagttgagaagaaaggtttgagtttgagccagaaagttgggtgtcaaaaacaggctattttctggccaggcgcagtggctcatgcctataatcccagcactttgagaggccaagggtagatcacttgaggtcaggagttcgagaccagcctggccaacatggcaaaaccccgtctctactaaaaatacaaaaattagtcgggcgtggtggcacacgcctgtagtcccagctactcaggaggctgaggcaggagaatcgcttgaacccaggaggcagaggttgcagtgagccgagattgcaccactgcactccaacctgggcgacaaccttaagactccatctcaaaacaaaaacgaaaaactggctattttcatcagcatagatgaagtattctagagaaagaaagaggagagagagagaagtatttcaagggcatgtcagtgtttaaaagttgctaagagctagcaaaggagagtgagaaagagtcctaggaaggtaagaggaaaatttcagaaggaacagaaggaacatgcttcaggaaggagggtgtggcccatgatcttcagtgctgcagacaggtggagtaggataagggtttcatccccaaataattctttttctttttcttttttctttttttctgagacaaagtctcgttagctgtcacccaggctggagtgcagtgtcccaggcaggagtgcagtgtcctgatctcagctcactgcaacctccatctcctgggttcaagcaatcctgcctcagcctcccccagtagctaggattacaggtgtgtgccaccatgcctagctaattttgtatttttagtagaggggaggtttcaccatgttgtccaggctggtctccaactcctgacttgaagtgatccacccgtctcggcctcccaaagtgctgggattacggcgtgagccactgcacccggccaactcccaaataattctaagataaaagaaatgaagacaggctgggcgtggtggctcacgcctgtaatcttagcactttgggaggccaaggcgggcagctctcttgaggtcaggagctcgaaaccagtctggccaacatggtgaaaccccatctctactaaaaatacaaaaaaaaaaaacaacaatagctaggcatggtggcatgcgcctgtaatcccagctactcaggaggctgaggcaggagaatcacttgaacccaagaggcggaggttgcagtgagctgagatcgcactattgtactccagcctgggctacagagcgagactccatctcaaaaaaaaaagaaatgaaggcagtcgggagtgcacctgaggatactgatgctttgagcctggagggccagaaaagcctcggagtgggtggcgtttgcactgggccttgtggatacaaagatttaaggctgaagggcgttgctgcttgaggaacagcaagagagagagagacatggaggtgagaagtcctggagtgagtagttagtttgacagaaaccctcagggtgcaattatagtcactgtccaaggtggactgccttgtgtgggagtctcctgtggccccggaaagaacagggtggcccaccaggcttgttgctccaggttgacagagggtgttgcttttggaggttccctgatgcatgtgcactgtggctccccctcccgctggagccaggcctctgatggtgcctgacactagctaaggctagggcagggaaggctggagacatcagatccattttcgtagaggagtgtttctgaggtggtacctctggagtctgaggatgctttttctgtcatcgtgatatcattttgcaggggacctgaaaatactaatgtacaatgtttgtgttgtggctttacatcatttctttgttgccttgaaccagttaggagtcacccagcaggtaatatttatttgacactgtgtacattacattacagaatggtgcaaagcaagccgacagtgacatccctctaggtaagtaattttgttttcttaaaaatcagttggctgcgtggtggcatgtgcctgtaatcccagttacttgggaggctgaggcaggagaatcgcttgaacccaggaggtggaggttgcagtgggccgagtttgtgccattgcactccagcctgggcaacgagagcaaaactctatctggaaaaaattaaaaattaaaaaaaaaaaatcatgcctgttggccgggcatggtgtctcatacctgtaatcccaacaatatgggaggccaaggtgggtagatcacttgaggccaggagtttgagaccagcatggccaacatggtgaaaccccatctctactaaaaatacaaaaattaggccaggcgcagtggctcacgcctataattccaacattttgggaggccaaggcagctggatcatccgaggtcaggagttcaagactagcctggccaacatggcaaagccccatctctactaaaaatacaaaattagccgggtgtggtggcgagggcctgtaatcccagctacttgggaggctgaggcagaagaattgcttgaacccggaaggcagaggttgcagtgagctgagatcctgccattgcactccagcctgggcaacagagtaagactctgtctcaaaaataaataaataaaaatacaaaaattagccgggtgtggtggtgggcgcctgtgatcccagctactcggaaggctgaggcacaagaatcacttgagcctgggaagcagaggttgtggtgagttgagatcgcaccactgcactccagcctgggcgacacagcgagactctgtctcagacgaaaaaaaaaaaatcagtcatttctctaatccttcacacattccttccagatctctccagcccaattaaagtaaagagactatctcgggtgtgcagaagtagaatctttgcagcattatttagaatagcaaataaatgatggtgtggccagtcgcatcgtactgtgccgtgtgccacgtgagtgtagagctcttgacattctcatgacgtggagcactctttacaatagatgaattgaaagaggaagacacaggagagtttataagctaccatttgttttttacatatctatatctctgaaatatcttttttttttttctttgagatggagtctcgctctgtcacccaggctggagtgcagtggcccgatctcggctcactgcaagttccgcctcccaggttcacaccattctcctgcctcagcctcccgagtagctgggactacaggttcccaccacc[131 bp omitted]caccgtgcccagcctgaaatatctatttctgaatatctgtatctatatttatatccctatctgtgtagagagatatctatatctgaaaggaacaccctggatacagtgactgcctggaggaatagagagataagacaaacttggtggctgagagacaagagtgaaagacatttccatgtaaataaaccatttacataactgtaaaattttttacctgtcaagcataagcaaggcctaacagttacagcctgtaaagaaacaatgagccttttttagattcggagagtgtatgacttccatagacagtgcgaggaagagcagccaaagatgctggctccctgtggcccttgctcaagatgactcaaacagaggccagatgaccacaacccaagggacaggacaccctgtggctgaggagcgaataccatgctgcagtgaagcagttttgtagcttgaagctgtgcccgcctgtagtctcagctacttgagaggctgaggtggaaggatcccttgagcccgggatgttcgcttcagcctgggatgttgaggctgcagtgagccgtcattgtgccactggactccagcctgggtgccagagtgagaccctgtctcaaaaaaaaaaaaaatgaagctgtgccctaaggggtgcatgtgtgtaggggaggaggcagaaagcctcctatctcatcagaactggaggcgaagagaagtgtcttgtgacagcctcctagggggagacaggcaggcaagtgggcagtagctcggtagtagctcctcaccagcctcccacactctcatggatcccgaagcgttccattcctatgaagactttggtcagctgcagctcaagctttggccatgtgcaaggttgccagcaatcaccatggcagaactgttcccctgcagtggcacgtgtacttgttacctagtcagaaagtggatttaatttgatttttccaaaggaggaaatcctcttaaaagcagtcccaagatgagtcactactgctcactgggaccagctctctgccaccgtggtgccacagttccttgccacccaaacttcttgcagtttttgaaattttcccaatataataccttccctacattcctcagacacaacaagactgcttttcatgccatgaggtaatcagttttgtgtgtgtactttcttctgttttacagatcgcttgacaatatcttattgtcggagtagtggtcctggggggcagaatgtgaacaaaggtacggggtgccttgttgctttcttttgctttaaaatgtagctgggagatgggcttgaggagctctgtgtttgtgttcatatggaataaagggatttttcagcagaagctttaatactgccagcttataataatcctctttattcttttgaatgtggtctgattctcagacattcagctgtgggttgctaggactaggatcggcttgtgagtctaaacaaagagaaatcacagttgtgaggtggcagccagctccaagaacaggtttctttcattctggtgcaacccattccctccattttttttttttttttttttgaacccagtaaaactgtaagagaaggactgggtgcttagttactggaagtctatttttgcccaaaagtgcctcactgtctttgcgggcttgttcatagccaacttggacataggctacaatgtacatggttaggtgtctggcctccctttatttcagaatggtcactggtcacccaggggttgatccttcctggaagtctcaggcacccatgctcccttctccctttcctccacagtgaattccaaggcagaagtcaggttccatttggcaactgccgagtggatcgcggagcccgtgcggcagaagatagccatcacggtaaccaccatccctttctttccctagaaatccctcagtggcttttaaacctttactctgtaggactccagtttttcatttgttctctgcagcataaaaacaagatcaacaggttaggagagttgatcctcacctctgagagcagccgctatcagttccggaatctggcagattgcctgcagaaaattcgagacatgatcactgaggccagccagacaccgaaggagccaacaaaagaagatgttaaacttcatagaatcaggtaccaggaaatgccctaagatgctataaactgatttgtgtggacaagagtctacacaggtaaggaaggggcaggggagagtccaaggccggccttgggagaaactctaggaagaggagaggatgctgacctgggaccgaggcctgcgggctagtgcctgctggtgtaactgctcggcttcccgttgagctcccaactcctctcaccactttgaaaagcactgattgggcatctggggctaattgcagtctttttgttttcaggatagaaaacatgaatcgggaaaggctgagacaaaagagaattcattctgctgtaaagacaagcaggagggtcgacatggactgaaatcaccctctgcagctgggagggctcttctgggcgtccgggcagctgcagctgagaggactttcacaccataaggagatttctgtttttctttttggctgttaatgcttgtctataacattggagccatcacaagaatgttcatttggaatgaaggctgcaggcactggttgcagacgtctttataggcagtcaccatgttgtcaaaccttaataatgcacctcatgtattagtcacaataaaaatcagaactcattaggcttcccttctcattcagaatgcttcagaaaacaattcctaccttttctctcagttaaatcagccgcacagttatcgacacagcactggggaacaggaaagggttctggtgtctgctgtgaaagaacacacaggccaggcgtggtggctcacgcctgtaatccaaacactttggaagccaaggcaggaggatcacacgaggtcaggaggtcaaaaccagcctgagcaacatagcaagatctcatctctacaagaactacaaaaattagccaggtgtggtgatacatgtccatagtcccagcaacttgggaggctgaggcaggaggatcacttgagccccccaggagttcaaggttgcagtgaaccataattgcaccactgcagcctgagtgacagagcaagaccgtgtctcaaaaaaaaaaaaaaaccaccgggcgtggtggctcacacctgtaatcccagcactttgggaggctgaggtgaccagcctggccaacgtggtgaaaccctatctctactaaaataggtggtgggcacctgtaatcccagctactcgggccgaggcaggagaattgcttgaacccaggagggtgacgttgcagtaagccaaaatcacaccactgcactccagcctgggcaacagagccagactccgtctcaaaaacaaaacaaaaagaaactacacacacaaccaggtaggagggctgagacaggtaagtgggcatttgagccgggctatggaaaaggcatgggactttcatcagtagacgggaggcggacatgccatttgaagggaacaatgaacacaagagacaaaagaggctgaggtggagggggtgacaaagaaggcaaaggcactgaatggtggattcgtgcagggtgatccaccattgcagcgggaggtgaacccagagagagaccggcttgatgtggagagccttgaattcaagttaaggagtttaggttcttttatttttgagatggagtctcactctgccatccaggctggagtgcaatagcgtgatcttggctcactgcaacctccttcgcccaggttaaagcgattctcctgcctcagcttccccagtagctggggttacaggtgcatgccaccatgcacagctaatttttgtatttttgtagagatggggtttcaccatgttggctgggctgctcttgaactcctgacctcaggtgatccgcccacttcggcctcccaaagtgctggtatcacaggcgtgagccactgcacccggcaaaggttttaagagatgtgggtaacagaaagctgttgggagaaaagctgagcgttgggagaaaagctgagtgttgggagagaagctgaggcagggcttgcatgtctgctagacttgctggctccttgcttctagcactcccattctctcaagcagccgtatgtttctccttcacttgatacactttcttttcaacccccacatcctcaccacctgtttctttgagcaccaataaataccgtgggctcccagagctgggggtcttcacagcctcaacactggcgatggcttcctggtgctactttctctctcaaactgtctttttctaattcctttgactccgccggactttgttgcccccatgacctggtgttgggtctgatcacctcaacattcctggctgcccaacgtggggtgacaaagaccctggtgaaggaacgctagagcgtgtgaaagcggagaacacatcgtcaaaggacacccaaaggcgtctaaaagaagctcggcaggaaagctgagcgctcggaagaaccagggtaacaatgggataaagtgaaagacattttgcttatttaaatttattttattatttttttttttttgagaggagtcttgctctgtcgcccaggctggagtgcagcggcgcgatctcggctcactgcaagctctgcctcctgggttcaggccattctcctgcctcagcctcccgagtagctgggactacaggcacccgccaccgcgcccggctaattttttgtattttttttttttagtagagacgag[135 bp omitted]gaagagggggagtgaaagtactcagaatttgttggcatttattatgaagagggggagtgaaagttagtactcagaatttgttatcactctttagtacagtaaagcagttttgcccatggcttccggaacaagcgactatggagttggatgaatgggagagaatcggcagagatttttaaaaggcgtataaagagggagcagatattccagtttctatttggtcatgtgggcgctaataaaggcagctcttgagccatttcaaacagatgatgaggcagattgagatgaggaagaggaggatgagtgtaaaaaactaacttcagattctgagtgtgaggaacagctaccggaggagattaaagaaaggaaaactaaaaaaagtatgttttactagcccgtcggcgccccctgctaaattaagtgaatggccacctcctctctctcctcttaatgggtgagaagatgaattagctgaaaaacttactactcctatagttgcaatattaaaacctggagcaattggtgatgctatagaaaattctattcataaagctagagccgagggagaccttgaagcatggcaatttcctgttactatcatccagcagagaagacagaatacagctaattggccacttttccttttaagttactaaaggaatttaagcaagccattagtcaatacggaccgaactctccttttgtgcaaactctattaaaaaatatggctcttgataatagattaataccatgtggctgggatactttgacaaaatctgttctcaccctatctcagtatttgcagtttaaaacctggtgggctgatgaagctcaaactcaggcaggggaaaacatacaagcacagccacctgtgcctgtttcctttgaacagttaatgggagttggccctaactggggttgattagagaaatcaagcagtaatggaggatgctgccattgttcagctgcgctttgtgtgcttatgggcatgggaaaggataaatgttacaggcgaaaaacatccttctgtcagttctatccgtcaaggacctaaagaaccatatattgattttattgctcagctccaagaggctgtgtataaagccattactaataaaacggctcaggatgttgtaatacagcttcctgcatacgaaaatgctagtgcagtgtcaaactgctattagacccctgagagggacggctcatttagctaaatatattaaggattgcgatggcattggaggtaacttacataaggcaactcttttagctcaggctatggctggattaagagtaggaaagaatataccccatttctcaggcccttgctttaattgtggtcaatttggacacccaagaaaggaatgtagaaaaggaaatcaaaaggcaaacattactaccatcagtcaacagaaaagtcccggtatatgtctccagtgtaagaaaagcaaacactgggcaagtcagtgtcattctaaatttaacaaggatggacaacctctttcaggaaacgggaagagaggcctgcctcgagcccctcaacaaaccaaggcacagccatgcccttacaaacgtgcaacaattgtcccccacttcagcaggcagtgctgccatagacctctacagcacaattaccatctccttaggagaggtgaagccgactgggcttctgggtcgggtggggacttgggtaacttttctgtctacctaaggattgtaaacacatcaatcagcactctgtctagctaaaggtttgtaaacgcaccaatcagcactgtgtaaaaacggaccaatcacctctctgtaaaatggaccaatcagcaggatgtgggtggggccaagtaagggaataaaagctggccacccaagccgcagtggcaatccgctggggtgctgtttcatgctgtggaagctttgttcttttgctcttcacaataaattttgctgctgcttcctctgggtctgcactacctttatgagctgtaacactcaccgtgagggtctgtggcttcattcctgaagtcagcaaggccacgaacccatcaggaggaaccaacaactccagacgtgcccctttaagagctgtaacactgcaaagttctgtggcttcactcctgaagtcaagcgagaccacaaacccaccggaaggaagaaactccagacacatctgaacatctgaaggaacaaactccggacacaccatctttaagagctataacacttaccatgagggtccgcggcttcattcttgaagtcagcaagaccaagaacccaccagaaggaaccaattccggacacacttcctggggagccaccaaagaaggtccccatgggagttaggagacccttatcctcaggaacagtcggtctattacttggaaggtctagtctaaatttaaaaggtgtgccaggtgtggtagctcacgactgtaatcccagcactctgggaggccaaggcaggcagatcatgaggtcaggagattgagaccatcctggctaatatggtgaaacctcgtctctactaaaaaatacaaaaactaatagccaggtgttgtggtgggcgcctataatcccagctacttgggaggttgagacaagagaatggcatgaacccgggaggcggagcttgcagtgagccaagatcgtgccactgcactccagcctgagtgacagagtgagactccatctcaacaaaaaaaattaaaaggtgttactatacatacaggaataattgactctgattatactggagaaattcaatttgttattagttccttgactctgtggtctgcctccccaggagaaagaattgctgatttgttgctgttaccttacataaaactaggcagcagcacagtgaaaagaacaggaggctttggtaatagtaatccagcaggaaaggctgtatattgggttaatcaagtgtctgacgaaagacctgtttgcacagtaaccattcagggaaaagattttgaaggactagcagatactggagctgatgtctctattattgctataaagcaatggcccctgcactggcctaaacaaaaggcatccattggtattgctggagtaggagctgcctcagaagtttttcagagttctttgattttaccatctcaagggcctgatggtcaggaagggacaattcagcctatcattatacctattcctgtcaatttatggggtagagacttattgcaataatgggatgctgaaatatctattcctgtggatcaatatagtaataatagtagacaaataatgaaaaatgtgggatatcacccaggaaaagaactaggaaaaaataaaaatggccaatcagaacctttagaaggacaaacagatcggaccggattggggtgtcatttttaggagcagccattgttgagcctccagttcccattcttgtgtggctaactgccaaaccagtttgggtggagcaatggctgctgaaacaggaaaaactggaggctttaaaagaactggtgcaggaacaattgcaaaagggacatatagagcctactttctccccttagaattatcctgtatttgtcattaagaaaaaatcagggaaatggagaatgttaacagatttaaaagctgttaatgctgtgattcaagccatgggtgcgctacaaccatggctgacctccccaacaatgatcccaaaatactggcctctcatagtgatagatctaaaggattgcttttttaccattcctttagctgcccaagattatgaaaaatttgcttttactgttcctgccataaataataaaaaaaccagcagatgatctggttgaatggctttttctacctcacaatacaaccaaaacactcactctgtacttagatcaaattgctgtgctagtagggcaagcgaggctgcgcacaacaaatctaatgggatatgatccaaatcagattatagttccattaactaaacaacaaattcaacaagcctatattaattcccaagaatggcaggttaatttggccagttttgttggcattcttgataatcattatcctaagtctaaaatcttccagtttctgaaattaacatcctggatattgccttctattactcaaaaagcccctattgaaggagccattactgtttttattgatggatctaataatggaaaagcctcatttgcaagacctcaacagcaagtttttcaaacagactgcttctttctgctcaaaggactgaacttatggctgtgataatagtgttaaaaacttttaaacagccagtaaacattgtttctgattcagcctatgtagtgcaagccatgcaaaatattgaatgtgccttaattcgaaatgtgactgatggaacaacttaatcttttatttcattctttacagaaagcagtgcaataaaggcattcccctttctataccactcatatgagagcacgtactaacctccctggtcctttaactaaacttaataaaagggcggatgcattggtgtctgcagcctttgctgatgcacaaacatttcattcttcaacccatcttaatgcctcaggccttagaagaagatatggtctatcatggaaataagctaaagaaattgtgcaacactgttctgcctgccaagtcctgcatctgccacataaaagaacaggagttaaccctagaggtttatctccaaattccatctggcagatgg[144 bp omitted]aaccccatctctactaaaaatacaaaaaattagctgggcgtggtggcaggcgcctgtagtcccagctacttgggaggctgaggcaggagaatggcatgaacccaggaggcggagcttgcagtgagcagagatcgtgccactgcactccagcctgggcaacagagcgagactgtctcaaaaaaaaaaaaagaaaagaaaagaaaattctcctttgttcatgtttcagtagatacctattcacattttacttgggccacatgtcaaacaggggaagctacagctcatgttaaaagacatcttttatcttccttttcagttatgggaatcccagaaaaaaatcaaaactggtaacggcccaggatactgtagtaaagccatggctacattttttcaacaatggaatattacccatactacaggtattacatataactcagaaggacaagcattactggaaagagctaaccatactttagaaactcaaatataaaagcaaaagggaggggaccaggaatataagacaccacatatgcaattgcatttagctttattaacattaaatttttttaatttacaaaaagatcaacccgtgactgcagctgaacaacacctggcaggacaaaaggaaaataaaaaggctggacaatatatatggtggagggatgcacatacaaagagctgggaaaaacgaaagataatttatggggaagaggatttgcttgtgtctctccaggtgacaatcaggtgcctgtgtgggtgcccaccaaacatctgaagatctatcatgagccacagcatctagtggacccacctgtacagtgcaaattgaaggtttaaggattgcttttatttatttattttgagacggagtttcactcttgatgcccaggctggagtgcaatggcacgatcttggctcactgcaacctctgcctcccgggttcaagcgattctactgcctcagcctcccgagtagctggaattacaggcatgcgccaccatgcctggctaatttgtgtgtgtgtgtgtatttttagtagagatggggtttctccatgttggtcaggctggtctcgaactcccaacctcaggtgatcctcccacctcagcctcccaaagtgctgggattacaggcatgagccactgcgcccggcctatggattgcttttaagcttcaatttgctttctctgtgccttctgttagaaggggcctgcttctcgttatcaaggtaagttttaccccgtggtaattaaccaaagaggcagaagctgagttacaaatgcttcagcaatggcctgcctcccagctgcagccacaaaagtttttgcttctgtttcagtagatttactaacatgggggtgagggtatgcttgtgtttttgcaggagatgagcaaaccgtgtaggtgccctcaaaatgtgtatgaccatgaacaggagactggaaggagccatggatcccaatcatggaccgggttcccccagtacgagccatgctgagaaactgctggaacaccaggattttacctatagatgcttaacggaccaatgctttctgactgaactcctctctaccctgaatagaagagaccctaatagggaggcaggaatatcatcaccccattcagcatgaagaagttacagaaaacggaccttcatccttctgcaacccctaggattaacggtcctctcgtaaaagggaaaggggagatatgtgggaagcatccaaaccagagcaattccattttgaaaaaggcctaagaaaaatgaagctggatcaccaaccagcaattaagagctgcacagcctgaaattgccttgctcaattaatttaaaaaagaggccaccttatgctagtaacaatgatagctgtggcagttttacaaaaaagagaaggggggcatgttaggagaaaagctgagtgttgggagagaagctcaggcagggcttgcatgtccgccagacttactggctccttgcttctagcactcccattctctcaagcagccatatgtttcttattcacttgatacactgtttcctttcaacccccacatcctcaccacttgtttccttgtttgagcaccagtaaatagcgtgggctcctggcgctcggggccttcatagcctccacactcgcgatggccccctggtcccactttctctctcaaactatctttttctcattcctttgactccgccagactttgtcgcccccatgacctggtgttgggtctgatcaccccaacaaaaccactgggtatcttgagtgagaaaaagtattgtgtgttaggtgctgcattaggcagtggattttagaggcacgaacagtaagttggaactggaaggagatttttgcagtcgtctcaggctagcattgcagtagtagattgctctggcatgtataaatttcttaaactgttctatatgattttgatctattttatatgagtacatgagtctaaacaaggggaaattcatctataaatgacttacaaactacaaaaatttgctcacttcagcagcatgcatactaaaactggaatgccaggcacggtggctcatgcctgtaatcccagcactttgggaggctgaggcaggcagatcacgtggtcaggagatcgagaccatcctggctaacatggtgaaaccccatctctactaacaatacaaaaatacaattagccaggcgtggtggtgggcgcctgtagtcccagctacttgggaggctgaggtgggagaatggtgtgaacccaggaggcagagcttgcagtgagccgagatcgcaccaccacactccagccagcctgggtgacacagtgagactccgtctcaaaaataaaataaaataaaattggaatgatacagagaagattagcatggctcctttaaagtaaagacgtggtccctgtcctcaagggactcagagcctaggagggggctgaggctcatatgcaggacgtacaaaatttcctagttcattcagtaattcagcaaatgctaagtgaatgccaggcactcacagcgtggggtggggaggagtcagaagtgaacaaagcaatattcttccagataattgacatttgatcaggtgataacaaaagctgagaggaaaaattgattcctcttacagtagcaggacctgaagcacgatgaatgacataagaaaggtctcagtagattgctggaggcagaggagtgactagttctagctggagggttggagaagatgtgcttgagatgggcctgaagggaggggagaactggcagggtaacagcatgtcacttggaggctccagtggtggccaacagcaaaggctaggaaaatggcaactccgaggcctgcctgcgtctggacaggaaacttgtgattgagagaatgggctctgaagcaaactgctcagggtcagctcccatccgtccacctcccccagctgctatctaacctctctgaaccttagtttccccacctataaactaggggggtttttttgttttgtttgtttgtttttttgagacagagtctcactgccacccaggctggagtgcaatggcgcaatctcgggtcactgcaacctccgcctcctgggttcaagcgattctcctgcctcagcctcccaagtagctgggaactcaggtgcccgccacacccagctaatttttgtatttttagtagagatggggtttcactatgttggccaagctggtctcaaactcctgacctcaagtgatcagtctgcctcaacctcacaaagtgctgggattacaggtgtgagctactgcattcagcctaaaccagaggttatgttattagcgccttcctcatagggttattgtgggatttcagtgaataaatacgtggttagtggcactgagctagtacttggggaatgtcagccatgatttgtagcccaatttggctggaacccagagggcaaggagctgtgcaagatgagtctgccacattgactgggatccttaagaaaggacttaaaagtgacagctaagacatttagtctttcccctacagaggctgtggcaggaagactgctctgcccacgacagaacgaggagactgtaggaaagtgtgcatggctggcaactgaccccctgtgagcagtcagggacacgttctggaactagggcggcggcagcagggatggggaggaaatactggatgctggaggattatgaggacagaaaattggcctgggtagtgtgggagtgggggtgtgacatggatgatgctgtgcactcacacagcaacgtcatgaaggggagtggccttgggaggacagctgatcagtgtggttttgccttcgaggaggggtgcccagtggtgatgcccaggagagggaatggaaacctggagctgggagtgaggttagagctgtaagatccaagacccagggagacaagaggaccctggggacgaataggaacagctgagcaaggcaaggctgagccccgggcgggcgggttgggggaacatgcctagctagagggcggcagcaggaaagcagagaaggcatccctgcaggttggccctggggcagagtgctggatcccagcaacggacaagttagttaacttaaaggggggcatcctcaaggcagtaaactggagccaagtgggttaaatccttcttgctgctattaaggggaggagacaggtttctgcagactctacattttggagagaaacagaaaagaatgtccccaagtctcctttgccctgcgatgctggggcagattggcaaggtcccaagagaagcacaatggtaaccgacgctgcccttggctgaacttcttctgttaaatccttcggatgtgagtagacttttatttaataattttttttcttttttttctttttttcaaatgagactgcatctcgctatgttgcccaggctggttttga[131 bp omitted]tgtgcttattctttgttagaattagggtgaaatatctacttggctgattttcctttctatctatacttgtagtatctagtatatatatatttctactattacaactggaagaacttgttccccctggttgtacattccctcatgataagcaagattttcagtgtttatgtttcaatattcatgattaatacttgtctgttctccttcacttcctacgctactttttcctaaaattcctggattttttatcagttctgtagaggcggacagcaaggctcagggcggtaggaaggaaactcctccaaacctcagtcttcataccccatggtccgggtgtccaggcaaccaccaagcggaccctcggggctccatggggcgtcccagtgccgggggctgggggctggtgctcgctaagtaaggatgggggcaggtccctgcgcaccgcggtatcttcccgcccgctcaccaaaagtgcgcgcggcagggacggacccactccatggatcgcgcctctgtcaggccttctctaggaaaaggggacactcgcttatgaggggaagggatggcacggccacgtgccccaagccccagtggcctaatggataaggcactggcctcctaagccagggattgtgggttcgagtcccacctggggtagaggtgaaagttccttttacggaattttttatttcttttctcttcccttctcagggatgctggaatcgaccttggtctctagttcgactcccgtgcaacgtgttgaggaggagccacctcctccaagcgcctaaagccggtaagctcgggtcttgccaagcccttgaatgaacagctttcgtccgggtagggccccacaatttcgaagctggggaaactcgtaagaataaagttgcccaaagggttcccaggacaccccagctccacctggcggggcagccccggagaaccagaggtaaatgaccaccgcgactgcaaacagagggtcctgcaagagaaggcgaggggcgcaaacagggcagaggcaagcaggtagcgggcaggtggtggtggattctgaggtctctggctgccggcaccaaaagaaaccttgcgagcacagcccctctcgacaccccaggtgggactcgaacccacaatccctggcttaggaggccagtgccttatccattaggccactggggcgcggtaagacgctaaacccacgtgctccttgataggtgttcaaccatagtgcccaaacacggccctgctgtgggtcaccgcgctccaagcctgagaagccatggggacgacaggatgaaccgctggctgggcgcggcgtccccaccgggctacacaagagctccatgcggtgacgacgcgcggggaccaggagcccgcggtgccctgtaaccccgagaagaagtgctcggcgagcgcagaggccggtggagcatagctgggaggaatagggatggacgagggcggagggaagaacaaaccctcaaactatgctgggattcgggcaagggctgctcgctccaaaagagcccgaccacaaaggaaccctcaatcttatgatctgacgtcagacgcctcatcccttaggccacgcggtcgcaattcccagggaggctcagagactagtccaggtgccgctccgctcgggggtgactaggcgggcggctggggccagaggaagggtgagcgcttcgctcaacaggcggccagggtgcgagcagtgaagctgcggcacgccggagcgtttaatggccatcaaattggcctctctaggaggtagctgcagccggagaccgcgtggcctaatggataaggcgtctgacttcggatcagaagattgagggttcgagtcccttcgtggtcggaacgttttaatccctgcaactataatcttccctcccttgttttagacccagaaacgcctcccaatccctccacaccgcggctcccgggatccgaagctggggagctgcttctgtccaatcaggctttgcatcccgggacgcttccggttatggcgtcattatgcagccagggtaagtagggccccatttcttgttgtctctcttgagctggtacctggaacgagttcaacatccaaacattcgcctcgtaaacgtgctctacaagctacaatcccacaagcaaatgacacggagcgggttatgtttcagtctatcgttatgaagttaaacagcagacaaaactccagtctctggccgggcccaatggctcacgcctgtaatcccaacactttgggagg[134 bp omitted]actcaggaggcggaggcagcaggagaatcgcttgaatccaggaggccgaggttgcagtgagccgtgatcgcgccactgcactccagcctgggcaacagagcgaaagccgtctcaaaacaaacaaacaaacaaacaaacaaaaaactccagtccctagcctcaagggcagtgggggtgctgcccaactctgtggcctcagtcctgctagtgggctctgtccacactcacacggcacccaccaccccactactctgtgcttggaggaagagggtgtcaggatgcatgtgtgtgcaagtgtacttggacataggggagaataaatgctaattttttttttctttttcttcttccctgagacggagtctcgctctgtcacccagggtggagtgcagtagcgtgatctcggctcacttcaagctccacctcctgggttcacgccattctcctgcctcatcctcccaaagtgttgagattacaggcgtgagccactgggcccggccagggaatggagttttgtctgcagcagacaaacaagctggggctacaggcgcccgccaccacactggctaattttttgtatttttagtatagacggggtttcaccgtgttagccaggatggtctcaatttcctgacctagtgatccgctcacctcggcctcccgaagtgttgtgattacaggcgtgagccaccgcgccctgcccaattacctttttaatgtaaaattaatgcatgtacaacgcaaaaatgctgaacaatccaagagggcataaaaaataaaagtacccccttcccacccacgtgcctttagctgagcctgttcccagttgtttgttcactgttatttagcacagggaatctcccaaagggctccccctaatgctggggttgcccccttcacatcccaacaccttcacggggctcagcggtgctctccttgaacagcgcgagctctaactatgctccaagtaaactgcattttttctcacatccctgcgctttcacttggctgtcgtctgcatcctcagatcctcagcgggatggctgagtgccagttcagtgactgcagtctcgcaggggaagggtgtggtacttctgttacgcacattaaaggccttgcacagctaccgctcctcatctctgcccagtcttcttgttgactcaagcagttttggggggagtagactccgcccctccgctgcctttcatcttcaacccggccttactcctaccaatcaggagccatgcacccaggctctcctctgcttatgttaagactacgctgatttctcgagggttgtcaggcattgttgctcttctccaatatactccgcctgcaaaaatgggccaggtgcggtggctcacgcctgaaaccccagcactttgggaggccaa[132 bp omitted]gaggcaggagaatggtgtgaacccgggaggcaaaggttgcaatgagcagaaatcgtgccactgcactccagcctgggcgacaaagcaagattccatatcagaaaaaaaaaaaaaaaaaaagaaatggcagaaatgtcacaagtctcccctgcgtagaccatgcagacttttcctacaggatttaagccacatcaagtcagcctttgcttactttcttacctagaaacttcccaggttatctcatttaattctcattacaatcctgatatttgtaaatgagaaaattaaattctcaagacagtaaacaatctaaaatcagcaattgggttgtaggcataacaggtcctctgactttaaggacaattctttctaccaccatacttttttctttaaatacttgcattactctatgatctactaccttgctttaaaccatctctattgcctgacgttgctcaggtctgctaaccatagtaaatagtggggattttaaaaattaagttaaaataattctccatgttcaggctggatgcagtggcccacgcctgtaatcccagcactttgggaggctgaggcgggcggatcacaaggtcaggagatcgagaccatcctggctaacatggtgaaaccccgtctctactaaaaataaaacaaattagccgggcgtgatggcgggcacctgtagtccgagctactcaggaggctaaggcaggagaatggcatgaacccatgaggtaaaggttgcagtgagccgagatcgtcccactgcactccagcctgggcgacagagtgagactccatcttaaaaaataataataaaataaaataattttccatgttcaaatgcaaaaagctgtaagttaactgtgcaacataagtttccctttttttttagaggcaaagtctcgctctgtcactcaggctggagtgcagtggcacgatcttggctcactgcaacctctgcctcccaggttcaatcaagcctcaagctgaggccaagatgcctcagcctcccaagtagctgggattacaggcgccccccgccccaccaccacgcctggctaatttctgcatttttagtagagatggggtttcaccatcttggccaggctggtctcaaactcctgacctcaggtgatccacccgcctgggcctcccaaaatgctgggattacaggcgtgagccaccatgcccagcccaaagtttccttttctaataccacttttgtgctcaaaagctgaagcacagagaagtaaatccctgctgttacacctagccatttggaccagctgttcttgtgacttactaatggacaagcaggagcactcccttggaaccaggggtttgaaaccaaagaggaagttgaagagaatcagcagataacaattctttactacatcacagtgaaatacactgccatagcccctagtgttatttgttgccatttcagcagtcctggggcctcagtaagtggcgcctacacagcccgtcagacaaccagcccaacaaacctgtcgaggctcacctttccatttaaacaaaaaccccgctgccagtgaggccagctcagaagagaggcttaattatctcaaccacagagaagaagcacacccagaactgtataattattatttttaatgtccagaatgtgtaatacaagggccagagcttcctcctggactcaattttataaattctcaattggttggtgaggccaatagggatactttttcttgtctaatttggtttctgggaaagcttcattcaagtcctcaatggtcatctgatcaaatggaattaagttcttcatcttctccatctggaaagagggggaatgtgtttagttaatgtaaacagagacggaaagcagaatatccaaggcaggttcctgccaccaggtgaaagatgtgtggtcatgaaagagagaacccatattataggcaacggctacccatcatccttacctctttctcatattctacaatcctggcctttgagagagacacccactcagcacaagatttcacctttaagaagaaagagaaattcagttctgaaaccaggctgcattctaccccagcagctgctaaggtaggagtcgtcccagcccactcctgctgtcctattgctctatggagaaactgtggttaccctgagtgggggcgctcactctgacaggcaaaccacagcttttcttaacactcacagagaagcccatatggaaaaccagcttaggatggcagcacccggctgcttctgcaagttcctcatccgaagacctacagaatgcctgttttcacagggctcagccactgaatggtcaggacacgccacctgagcacctagccagacttctctctggtggagccactgagttccatagttggccttcagtgctttcaagcaaataattaggtatttgaatactacttgggtaatttttctaattccaactccttgtttctaacagctttgttgaggtatatctgaaatatgataaaatgcacatatttaaagaacaccatttgataagttttgatataggtatccacctgtgaaaccagcagtcccctctcaaccatccccaggcagccactgtagacaaactacattttctagagtcttacaaagatggaatcatatgctatactcttctttttcttgttggcttctttcactccgcataattattttgaaattcgtccatgttgttgcatttattgacaagtcattcctttatatggctgttaactcttccatttaattcactctaacttaacttagctataatagagagctgtcaagatcaagagaattttagaataagcaggagcctcaactacttacatcttctttttcttcggcatccacctgggcagtatatttatcctctggcacgggaaccttcagcgcattaaactacaaacacaagggcacgggaaccttcagcgcattaaactacaaacacaaggacagtgagtcgtcgccaatacacccaggagctcaaagggctggaagctacgaatccttaaaggtcatactgaaagacattctgtgtcccaagcggaaacgaatacgcatctcaatactggagtagaaagaatattagactgggaacaggagctcaagggtcttctcagccctatcactaactcggaaccctggacaattctttatgatgataagcttcattttcttcatctgaaaaggacagctggacttgatgaccaaaaaatggcctcttagcaccttgaattgtaaagaaattctgatttctcttctgcatggaaccctagggagctgactggtggaaggagcactgcgtaatgaatggtctccttagaagactgcttagtgttagccgggtgcggtggctcatgcctgtaatcccagcactttgggaggctg[134 bp omitted]gaggcaagagaactgcttgaacctgggaggcggagattgcagtgagctgagatggccccactgcactccagcctgggcgacagagcaagactccgtctcaaaaaaaaaaaaaaaagactgcttagtgttatggctccagcacttaacactacctggcacagagtaggccctccatacacatctttgaatgaataagcaaatgaactctggatattgagacttgtgtaaatatcagaggaggatagatggatgagaaattacagctataagggacagttaaaaaaagcagaggctgggcatggtggctcacacctgtactcccagcactttgggaggccaaggagggtggatcacctgagctcaggagttcgagaccagtctgggcaacatggcgaaaccccgtctctaccaaaaatacaaaaaattagccaggcatggtggtgctgtggtcccagttactcggggggatgaggtgggaggaaggcttgagcccgggagaaagaggttgcagtgagctgagatggcgccactgcactccaacctgagtgacagagtgagactccaactcaaaaaaaaaaaaaaaagaagagcagagaggtggattgcctgagcccagagtttgagaccagcctgagcaatatgacaaaaacctgtctctaccaaaaaaaaaaaaaaaacaaaacgaaaatttatcaggtgtggtggtggcatgcacctgtagtcccagctactcaggaggctaagacagaaggatggcttgagcttgggaggcagaggctgcagtaagctgagattgcgccactgcactccaccctgggtgacagagcaaaactccgtctcaaaagaaaaaggacaggaaaagagtagaaaaaaagtcagtttgttccaaagggagacaggaaggaagctaaaaggaacccaggaggtgggcaaacatttaacttgaaagccccctggggcgtggtggcgcatgcctggctgaggcacgtggattgcttgagcccaagagttctgggctgtagcgcgttatgccgatcgggtgtcttcaccaagttcagcatcaatatggtgacctcccaggagcgggggaccaccaggttgcctaagaaggggtgaaccggcccaggtcagaaacagagcaggtcaaaactcctgtgctgatcagaaagccctctggctcccagattaaggctacactctactgctgaatgaacagagcctaaattcctgcacctatttacagttcaatcgaccacaaggcctttggccatacgcatccttcctaagcttccttagggatctggctgtcatgctgtgtatgtaattatccctgttcctgctccctacccacaggcatgttacaagctcagtgctttagaggtgtgaagtctcaccttcttctcaaagtcatccaccaagccagccttggccacattggccttgtagtaagcccagtcgatagctggtggattctcaggtaaagcagccaacctgcccacaaggaaaggcaaaagttaggattgttcataagcagtagaaaattcacatggtaattttcctatcccttcttcctatggcctggagggtcaccacactttcctctcctaagatcatcatgaaaatgcaaggatttctttatatgttgtcataagggcatcaagaattcatatgtaattccttaatactgttttgtttctagattcagtggcaagtatggggttccctctcagaaacatactgacctggaggtgagggtctcattccaggatttcagggaactagcaatggccttttggttctggggtatgatctctgcaaaagctacccagtcaatggtttttagagcaagttttcgcccagccattttgggatcctgaaaaataagtcaaataaaaacaaggcttttttatgaggtgaattttcagttgggaaaaatgataaataacaaaataagagctcttagagagaatcctttaaatcttagaaacatgcaagtcttcacaagaatcacttgaacccaggaggtggaggttgcagtgagtcgagactgcatcactgcactccagcctgggagacacagcaagactccaactcaaaaaaaaagaaaaaaagacag[135 bp omitted]atggcaaaaccccatctctattaaaaatacaataattagccagccgtggtggcccgcgccataatcccagctactccagaggctgaggcataagaatcacttgaacccaggaggcagaggttgtaatgagctgagatggcatcagtgcaccctagcctgggcaacacagcaagagtccgtctcaaaaagaaaaggaaaggacagtgtagcttttcaaattcaaagtgtgcaatgtggcatacaaatacattctctcccaactcctatttagccttaaaagcccagctctcttggccgggcgcagtggctcatttctgtaatcccagcactttgggaggctgaggtgggtggatcacttgaggtcaggagttcaagaccagcctgagcaatagggtgaaaccctgcctctactaaaaaatacaaaaattagccgggcgtgatggcatgcacctgtagtcccaggtactcaagaggcttagacaggacaatcacttgaacctgggcggcggaggttgcagtgagctgagatagcgccattgcactccagcctggacacagagtgagactctgtctcaaaaaaaaaaaaaaaaacaaaccccagctctctttatcccctccatgtgcctctggaaaaattactaaaaataacactcttattgcataaaagttaataaagacatttccacccagattgtgttttattcactgattctccagtagacagaaactgacacacacctaagtttcaacaagccttaaatagagcactctctaggctaaaatttacttatgtgtacaatgggcattatcagtcctgcttgccccagagggctgctaaaagtgtcacatgaaattgtgcacagcaacttgctccagagttttacaaacttaaaagggctatccccttccaactagattggtaatacacctgcaccttcttattcacatcggattataccctagcagcaccagcacacgttgtgcactttttttttttttttttttgagatggagtttcactctgtcccccgggctggagtgcagtggcatcatcttggctcactgcaacctccacctcccaggctcaagcgattctcctgcctcagcctccggagtagctgggattacaggcacccaccaccacacccagctaatttttgtatttttttttttttttttgagacggagtctcgctctgtcgcccaggccggactgcggactgcagtggcgcaatctcggctcactgcaaactccgcttcccgggttcacgccattctcctgcctc[207 bp omitted]cagggtttctccacgttggccaggatgggctgaaactccagacctcaggtgatccacccacctcagccttgcaaagtgctggaattacaggcatgagccaccgcgcccggcctgcattttaagaggtattcaacacatgtgaaaatgtgagaaaaatacagaaaacgactacagccacttaaaaaaaaagtcagaatataggaaaatagtcctctttaagtaagatcagggtcagatattaaaagactgcaaagtcaaaaatctctataagcttggagtggaatgcaagggaggcggaagcagtctttctcaggatcttcaagaaagttgtcaaacacctgtcctgtccttcctttctttctcaggacagcctgtttcctgttgtggaggggaggtgttaaggcaattggcatgtgattttaaagttaccagggaaccaagcacccttacagactttcccaaacatcagtgtatcggggaacttgccccgatagtcacataggttcttttctattttcctaagcgtcgactggcttgacagagtacaaaagagagaaattttaaagctgggcgtccgggggagacatcacacgttggtaggatccgtgatgccccacaagccacaaaaaccagcaagtttttattagggagtttcaaaaggggagggagtatacgaataggtgtgggtgacagacatcaagtacttaacagggtaatagaatatcacaaggcaagtggaggcagggtgagatcacaagaccacaggaccagagcgaaattaaaattgctaatgaagttttgggcaccattgtcattgataacatcttatcaggagacagggttttcagatcaaccggtctgaccaaaatttattaggtgggaatttccttttcctaataagcctgggatcgctatgggagactggagtttatttcacccctgcagtctcaaccataagagacaggtacgccccaggggggccagttcagagacctacccctaggtgcgcattctctttctcagggatatcccatgctgagaaaaagaattcagcgatatttctcccatttgcttttgaaggaagagaaatatggctctgttctgcccggctcaccggcggtcagagtttaaggttctctcttgttccctgaacaattgctgttatcctgttcttttttcagggtgcccacatttcatattgctcaaacacacatgctgtacaatttttgtagttaacacaattattacagggtcctggaacgatatacatcctcaactgacaggattaagagattaaagacaagacaggcataggaaatcagaagagtattgactggggaagtgataagtgtccatgaaatctctacaatttatgtttagagattgcagtaaagacaggcataagaaattacaaaagtattaatttggggaactaataaatgtccataaaatcttcacaatccacgttcttctgccatggtttcagccggtctctctgtttggggtccctgatttcccgcaacatcagtggaaaatggaagtcacaaataactttgtgtgtgtgtgtgagtgagacggagtctcgcactgtcgcctgggctggagtgtagtggcgtggtctcggctcactgcaacctccgcctcccgggttcaagcgattctcctgcctcagcctcccgagcagctgggattataggggccttccaccacgcccagctaattttttgtatttttagtagaggcggggtttcactacgttggccaggctggtctcgaactcctgacctcgcgattcgcccgccttggcctcctaaaattctgggattacaggcgtgagccaccgcgcccggcgaaattttttttaattcttaaaaatctattgcttaatccccagcgcctagaacagatcatgcgcataggaggtgctcaatgaatctttcttgaatgagtaaccgaactctgcacccgaggagccctgaacgctctatacgttcgaatcctggaagctgccgaaggggaagggcgcagccccgcagccagctgagcgtccctcggcaggttaacactgtctgcgtaatgtttccccagtccccccaccaaactattgaagtctgccgcgctgggagcggactgcacgagacacggcttgtggcagcgcctacatcagcggcgcctgggacacagccgggcccccctgaccccgcgcgccaaggagggctgaggaagggatcgcggggcgaggagcggcagctacacaagggacactctgccagcggggcaagccgagggcccagcgtccttgacgggggcgtgacaagggtcggcgtgaggtttggagagggcagagcagaggagccctccagggatcggatccaatgccccaagccccactcaccttcaccgaccctggctgcccacggtcctccgcagcaagtaacggaagtgggtcacgggaagatctttcctcagccaaccccaaagccaagggggtgggccttgcttcgcagatcagccaatagagatgagggctggttccggaagtatcttcccgggggcgggcacagcgcctcccccgcgcgggtccccgggcgctggttgggggcgctcccgtccctctcccctctgccccacccccgccgatgggccggcccggctctccctgccgagaaatgggccggcccggctgcgcgcgggcagcagcggtggcggcggcggtccaagatggcggaactgcagctggacccggcgatggcggggctgggagggggcggcgggagtggggtgggcgacgggggtggcccagtccgcgggccccccagcccacgcccggctggccccacgccccgcgggcacggccgcccggctgccgccgtcgcgcagccgctggagccgggtcccggaccacccgagcgggcagggggcggcggcgcggcccgctgggtcaggctgaacgtgggaggcacctacttcgtgaccaccagacagaccttaggccgggagcccaagtcatttctctgccgcctctgctgccaggaggacccggagctggactcagacaaggtgtgccccgccctcgggcgcgcccccgggccttcgaaccccctggtttctcgtagatcggtccccagagtcctgagacacgctcctcacaggcagccccctcaggccgggaccccatcctccccctccctcccacactactcgcaggggcctcagagggacctcccactccccttcttccatgctgaggcatactctggctttctccccgaccccgcccttcgttctctgagactccttcccacactgcgcccacctgcacccacgagaacgcactccacaccccttctccatattctctgcccctgacatcccactgagatctgcatgagttttccctggctcctcttcagtccccccactgccggtgccagatgcatccagaactgggtcagggttagctcaggcatccttgtagctttctcagactccctctcggacccctctgccaagttgggcttccacagctgcaggaagcgctccttgtgatatcacactgcttttctatagtcctggtcgcagaacttttatctgttaacagtcactggtttaggtccatatttagatcaaatgcgttttttggaaagaggttactgtttgccgctgcaaatctaggctaagacagaaggaaaatgaaaattttcccgggaaaattttgggcaggatgcatggctgctaaccaaagggttgagaggtgacaagacacttaaaccatttccagtttgaactgtgtcaatttctttttaactttacgtattcacctttaagttctcaacttaaaggcactgaccataactcacaccatcttatatcccatatagcactcagctggtgacctcaaaacagagctggagttgcgtaaacatttgttgttttcgtttattcctcttctctaagaaatctcagattgatggaaacctatcctgccctaactttaaagagatttcaaaacccttgcttataaaggaattatttttatctactctatatcctccttgtggtaatagaagccagtttcttcttgttccttttactgtaaagatgagtaggattaaagctgctcagagccaagtcctggcagtaccgagcttcctctgggcacagagctggggtgtgtgagattacagctggcagtgcaaactcccactgatgttggccttgagctcaggagcattgccaactacacagaggttttcttggaattaggaatgcagttcagaggcagtggaaaagtcagaatgtccatctcaagcaaagatttcagttacacagctacggcattttctccctttcttaataacaaacacgctacagaagaatgtttgtcactgtaattattgtccaggcaaagattgcaaattccagccagtaagtaaacgcctaaatgagtatgactgtctgtaacaccctacctaagatgatcttaatgtacaagatacataaagctatagctttcttaccaatagtttgtgacaaatgtgtaacaaaatttgccatcactaaagtcttttttagctgatggaatgaattgttgtcttggggcgctgacaaagatggtgaaatcctgccctgcctttgtttaaaatactcctcaaaggtccacaatgatacccttgtgtttggttggcaggatgagacaggagcctatctgattgacagggaccccacctactttggtcctatcctcaactacctccgccacgggaaactcatcatcactaaggagttggcagaagaaggtaagcgcactgtttgcattggggattttcaaaatgcaagtagaatctttaaagttgttttacagatttcaattttgtttgacattttcatcaggcgcatgtgcaggtatagtttcaggtttatgaaacagagcagaaactaccagtcttgtctgagggagtcatgattaaggaagcctccttaggctttgttcagcttcctgggtgagaaggaagataggtagctccgctttgcagataacttcaggagttctttccgaatctccagaattgtcacgatcctttttttacatttgtttgtgtgctagcagtgagtgtctgtagtctgaagaagcaagacatctctgacattcaattatttatagttttaattttggtttgaactcacagttgtacaaaaataataaaggcttggcctcatttcttttaagactctggcctcatgcttccctgtaaatgtttgcagctgacctaattcattctctagttcattgtcaggtgtatcattacttgcctcatctttgtggtttgtagggcattgggactataagtgggtctagtccactttctacaaggcttggcatggtcccactgaaggcattcagttgtaaaggggactgtccctaaatccagggcaccctgatctgggagctttggctctgagtaagaaagcttgtaatggctgtactagttaatgaagtgactgtgaaacaactctgtttcagctagtagaaagaggaattgctctctctctctttttttaaatgtccctttttaaacaatatttcaaacgcatacagaagtaatgggaatagtacatacagtgaattccttgcatccactatccagcttcaacaattaccaactcatgggtgatcttaatcttatttatttttcttttttaatttttgtaagtacctagtaggtgtatatatttatggggtacatgagatttttcttttttttttcttcgctcaggctggagtgcactggcacaatcttgactcactgcaacctcagcctcctgggttcaagcgattctcctgcctcagcctcccaagtagctgggattacaggcgtgcaccaccatgcttgactaattttttgtatttttagtagagacagggtttcaccatgttgaccaggctggtcttgaactcctaacctcaagtgatccacctgcctcagcctcccagagtgctgggattacaggcctgagcctccgcgcccgacctgagatgtttggatataggcatgcagtgtgaaataagcacatcatggagaatggggtatccatcccctcaagcatttatcctttgtgatacaaaaattcaattaccctcttttagttaagtatcttttctaatgcctttaattaaaaaaactttattttgaagtaatttaaaacttcaaaataagcaagaaaagagcaagaataacacagagaactccctatatcccagattaaccaattttcaatgttatttttgtcatatttggggtatggggagatctttttgttgtttttttaagagtcagagtctatcttatcttgcccaggctggtctcaaatgtctggcctcacatgctcctcctgcctcagcctcctgagtagctgcgattataggcatgagccatcatgcccagctttttttttttttttgagacggagtcttgctctgttgcccaggctggagtgcagtggcgcaatctcggctcactgcaagctccacctcccaggttcacgtcattctcctgcctcagcctcccgagtagctgggactataggcgcccaccaccacacccagttaattttttgtatttttagtagagacagggtttcaccatattagccaggatggtctcatctcgatctcctgaccttgtgatctgcctgcctcagcctcccaaagtactgggattacagacatgagccaccgcgcccgaccttttttttttttttttttttttttggcgacagagtctccctctgttgcccaggctggagtgcaatggcactatcacagctcactgcgacatccacctcccgggttcaagcgattttcctgcctcagcctcctgagtacctgggattacaggtgcatgccaccacgcctggctaatttttttatttttggtagagacgggggtttcaccatgttggtcaggctggtcttgaactcctgacctcgtgatccacccgccttggcctcccgaaatgctgcgattacaggcgtgagccaccatgcccgaccttttttttttttaaatcatatttgcattgtccttcattctctatttccccctccctacccccatcctcttgcctctcccaccacagttatttctgaactatttgagaatagattgcagatttcaccccttaatatttgtatatatttcccaagaacaaggatactgttttatgtaaccacagacagtacagttatcaaactcaggaaatttaatactgatgcttttatctacagcttatattgcagttttgtcagttgtcctaataatggcctttatagcaaatttattcctataggatcacacgtctcatagttgccctaaggcctttgagttcatttagcatgcaagtctttaaatggttgccttttatattgttcaaatgattagcatcctattaagtttggcccacataaatttgtacacacacctccacccccacccccagtccttttgagggcagattggacaaaaatatcaagttcaggaggtgtccaacatgactagttccaggaactaagtgacatatgggaaaagtgtcctgcagctaatgggcaggtgccaggtagggaaaggagggttgaaatggagtgagcagaacataccctggcgtttgactaatttatgttggagaaaaggtcatgggtttaccgaaaatagcaaagagatatttcctagcagaaggagagagattggatttgcatttaaataatgcagtttttaggccaggagctgtggctcatgcctgtaatcccaacacttggaaggccaaggtgggcggatcacttgaggttaggagtttgagaccagcctggccaacatggcaaaaccccgtctctgcgaaaaatacaaaaattggctgggtgcggtggctttacgcctgtaatcccagaactttgggaggccaaggcagatggatcacctgaggtcaggagttcaagaccagcctgaccaacatgatgaaaccctgtctctactaaaaatacaaaaaattagccaggcgtggtggcaagcgcctgtaatcccagctacttggaaggctgaggcagcagaatctcttgaacccagcaggcggagtttgcagtgagccaagatcatgccattgcactccaacctgggcaacaagaatgaaactctgtttcgggcggggggaaaaaatagaaacagccgggtgtggtggtatgtgcctgtagtcccagctacttgggagactgaggcaagagaatcatttgaacgcaggaggcggaggttgccgtgagccaagatcgcaccactgaactccagcctgggcgacagagtaagactccgtctcaaaaaataagtaaataaataaataagcagtttttagcaagcatgtaaccttcatcctctccttggtgtttttctggcaaaccctcgcacctatctgactgcagttttgtccttgttccaggtgtgctggaggaagcggagttttacaacatcgcgtcccttgtgcggctggttaaggaaaggatacgggacaatgagaacagaacttcacaagtaatgtatttggaactgttaaggagggttgtttcaagtgggcttctgtcggtcggtctgtgatttgaaaaggatgcctttacccttagagctggaggtgtgtgtggaacaccgtttgcagtgcagggaatgcacactcagccaaactgcacaggagaaaagaagaaaccacaaagaaaacagaataggcctatgtcccaatagaatgagaagattgtcgctgcttaccagatggcgggaggaggcgcccagggcactttaggtctaaaacctgttctctgcccgagtatgtctccctcctaaagaccatagaggtcttggttgcacccgttggccgctctttttttttttatgagatggagtctcgccctgtcgcccaggccggagtgcagtggtgcaatctcggctcactgcaacctctgcctcccaggttcaagtaattctcctgcctcagcctcccgtgtagctgggactacaggtgtgtgccaccacgcctgactaatttttgtatttttttagtagagatggggtttcaccatg[132 bp omitted]gatcgagtcacatgcagctcctgtgagccact[138 bp omitted]ccaccacacccagcctgaaccatgcttctaagaacataatatcaagctgctctttatgatggtgtcttgattttggcggggagagggaggacaaggtctcactcccgttgcccaggttggagtgcagtggcgtgatcacagctcactgcagccttggcttcccaggctcaggtgattttcctacctcagcctaccgagtagctgggactacagctgcaagctaccacacctggctaattttttgtattttgggtagaaacgagccttgttggccaggctggtctcaaactcctgaactcaagcaacccgcccacctcatcctcccaaagttctggaattacaggtgtgagctaccgcacctggccttgattttgatattaactcagatacagtaacaagagcgaaagggaatttgcccacctagttagaggaaagaaagatgttacggcacatctatttcacatcctgccattcgtcatatgtttgtcgtgtgtttgaatggccataatagcttctatttggcccttgggattc[226 bp omitted]gaagcaggagaatggtgtgaacccaggaggcggagcttgtagtgagccaagatcgcaccactgcaccactccagcctgggcgacagagggagactccatctcaaaaaaaaaaaaaagaagcttgaagtatagccaggaaaatagaccctctctttcatgcgattagactgttttaagaaactgcaactacagagttaacagtaagaaggcagagtcgtgctccaccatgactacctgtgttgtagcataattgcctcttttcccatcagatactggtagtagatgctttaggtataatctattgcagcacagaattttcctgccattaagaaggcaggaaaattattcttttttcttctttttttgaggcagagttttcctctgtcacccaggcaggagtgcagtggcatgatctcggcttactgcaacctctgcctcccaggttcaagcgattctcatgtctcagccacctgagtagctgtgattacaggtgtgtgccacaatgcctggctaatttttgtatttttagtagagatggtgtttcgccatattgaccaggctggtcttgaacttcaggcctcaagtgatccacttgcctcagcctcccaaagtgctgggattacaggcatgaggcaccatgcctggcataagtttacttttaaaagtaaaaaataatgccttggtctttctatgttagatttcatatatcaaagttttctggctctaggccaggtatggtggctcacgcctgtaatcccagcactctgggaggctgaggagggcagatcacttgaggtcaggagttcaagaccag[133 bp omitted]gaaaccctgtctctactaaaaatacaaaagtagctggggtggtggcacatgcctgtaatcccagctacttgggaggctgaggcaggagaatggcttgaacccgggaggaggaggttgtggtgagccgagatcacgccattgcactccagcctgggcaacaggagcgaaactcccatctaaaaaaaaaaaaagaaagaaagaaaccctgtctactaaaaatacgaaaattgtctgagtgtggtagcgggcgcctataatcccagctacttgggaggctgaggcaggagaatcgcttgaactaagatagcagaggttgcagtgagctgagatggcaccactgcaccccagcctgggcaacagagtgagactccatctcaaaaaaaaaaagttttctggctctaactggaatatttggatgaataactgacactaatgatgaaaaattaactcttttatccactttatctccagcagtttgcaaaagtgaagagaagggcttattcatttagttttcttccatctagctgacagctcaaaggctcctttttgatgttcaaaggtggctttgtagttggtttgcagattaccacttggaatgtgatccagtgtcaccagtctctttgctatcttacctttacgtggtatctttcactattgtagatatttaatagtttagacattttggtaatctagccttatcctcagtttcccacattctaaaaaaatgattgcttactatagattttaaagtaccatgaattatgtaatttgaaatgattcaagtcatggtacctgaacattctcccttcttcgtcattagctaattcctggagagcattataagatttctgtttgatgaccgcaattaaattaattagtcttctagattctgaaggcttgtggatttatacccctttggaagcttttttgttctaggaatgtcaagacctttttgatgttaactatctttccatctgtcctttttatgtagtgaaactgaaaaatggatttgatgttattcaaagacaccctcttttatacttgttgtatgtggctctaagatgaagttggctgtgtgtggattttcgttttgtttcattttgtatttttctttatttttttgtgtgtggattttcaaacatgttacctccttgaacttacctgtagcccctcacacatgcaggattcaagccaagcccaagatgtgggcctcaaccctaccttcggtttcatgacctcttagctcttagtggctgccacctaactactttcctctgtttctttttttttcttttttctttttttttttttttttttggagacagagtctcgctgtgttgaccaggctggagtgcagtgatgcgatctcagctcactgcaacctctgcctcctgggttccagcgattcacctgcctcagcttcccgagtagctagattacaggtgtgcaccaccacgcccggctaatttttgtatttttagtagagacagggtatccccatg[133 bp omitted]gatcctggtgcatttgagagcacaagtggtttactttggaagggagaaaaaagaggcagtataatggcatcttaaatacctgggactttgacagctgtggccaacatcacagatcttttgtgatactctgaattttgtacttatacaattggtttccaaaataagtggttacaaccaattaaaatcttcagaggatttgtactatatgtaatatggaaggaaatctttgaaatccttagtactttggttaatgatagctatacctcttttttttttttttttttcctcgaggcagagtcttactctgtcgcccaggctggagtgcaatggcgcgatctcagctcgctgcaacttctgcctccggggttcaagcagttctcccgcctcagcctcccgagtagctgggattacaggcacgtgccacctcacctggctaattttttgtgtttttagtagagatggggtttcaccatgttggccaggctggtcttgaactcccaacctcagatgatccgcccacctcggtctcccaaagtgctgggattataggcgtgagtcactgcacccggcgatcgttatacctcttttggaagaaaacatagaagaaaaaatacagcattgtcggccggacacagtggctcatgcctgtaatcccagcactttgggaggcctaggtgggtggatcgcctcaggtcaagaccagcctggccaacatggcgaaatcccgtctccactaaaaatccaaaaaaattggctgggcacagtggctcatgcctgtaatcccagcactttgggggcccaaggcgggcggatcacctgaggtcaggagtttgagaccagcctggccaacatggtgagacttcgtctctactaaaaatacaaaacttagccaagcgtggtggtgggcggctgtaatcccagctattcaagaggctgctgaagcaggaga[133 bp omitted]cacatgcctgtaatcccagctactcgggaggctgaggcaggagaatcgcttgaaccagggaggtggaggttgcagtgagccaagatcaccccactgcactccagactgggcaacagagcgagactccatctcaaaaataataataaggctgggtgcggtggctcatgcctgtaatcccagcactttgggagaccagggcaggtggatcatgaggtcaggagttcaagaccaagcctggccaacatggtgaatccccttctctactaaaaatacaaaaattagccaggcttagcggcaggcgcctgtaatcccagctattcgggaggctgaggcgggagaatcgcttgaaccggggaggcggagttgcagtgagctgagatcgcgccactgtactccagcctgggcgacagagtg[175 bp omitted]ggtggcgggtgcctgtagtcccagctacttgggaggctgaggcaggaga[132 bp omitted]tttaccttatttttgacttggggaaatggattaaatctaagtttgttggcatagttgctcaagcattcatccctctgaagttcagaattattttaccttttttattctttcactctttggatatgtttttattgaaaagccacagtatgctggcttgtggtcacttaaaaagaaaaacattttttaaagagaagggaaaaaaagaaacgccacagtactatttgtaaaaggggatagtgggtggctgccaagaaaagatttccaagcaaactccttttcagtgtttattcatttgaagagcctccttggggcagctgcaaactgtggtgtccttggtgctgttctcagtctgcgcctggtcattgcagggccccgtgaagcacgtgtacagagtcctgcagtgtcaggaagaagagctcacgcagatggtgtccacgatgtccgacggctggaaattcgaacaggtacatctcttaacagagcagcaatcccaggccccgttcaaggggtctgcagctcttcaaacaatcagtgtggatggccaattaataaccacgggagacggctacggccaggtgggatcctattccaaaacatgggcaaagagccatttggtgggcactgctggcctagtggtgcgtgaggagttggggaaacagaggagcatcatgtcttagcttcacacgcagactttccaggggagccaacgagcagtttaggcttgaagtgcctcaaagcctttggtttttgttccctcacagggatcgtagaatgagtccctaaaggagactgggattcgacaacaatccttccatttcttttcccagggtcagaactttttggttctgaatgtcttatgtaatccaccgtgaagagcttggtgaacagctgtgctaggaaggatcaggcgccatgggaagtgtggtgcggccgtttcccctacttctctccgcctcgtgcttacgactgagctatcaaaacaaagctatgacagttggagcttcactgttctcctccattagatggcagacttgttaaattctgttgccttcaaaacataggaaggccagagcgaatagagtaaatacaattttttttttttttggaaagtcaaatccctttcttcattccatcccttttagacatggcatttaaaacagacattgctacatcactaacttcccacaagctgtggtgtccactggaaaaatgtagtccttgatatttctatttcacattcaagtgatcctctgccacttattaactggttcacttcaatttcaaaaagccaaaaaagtcctctaacataagccttccaaggtgatactttcagaaaccagggttggaactaaccagacaacagcgcgacagccaagaccagctgctcttgatgcccttttcacttctgtgttgtcctggttgaagttggcaaagagcagctggccggcgccggcctccccgctctggctcgccaggttcatggctgggcgcgtggcgagtgggcccggccagggagggcgcgcgtgcgagggcgggtcaggctgcactcagggtctcggtcgccgccactcgccaccctgggatcaaccgcctgagtaaatatgattttatacggattatgcctacttatgtgtagagttttaacaggtcaacagctgtctcaccagatgcttaccttctaaaagaaaactcacactttgcattaatgctgttatctcacagatcaagtgcaaagctgtctctgccttcagagccagcggtgattatttctcacacttagcttccaccacggaatccactctgcctgtgtctgtcatcctggttcttactgggcatgggttgtaaaacgtcgccaagagtttaatgccctccactccagaagtatttttcctaatatgagctcttaagcaaaggatttttttaatgtattctttgtgaaactaaaatgaataatttcttgttaatttctcatcttattactgtcccgtgggaagacggagggtgttcctattgcctcccttctggatgaggaagtttgtttcagacaggcggaggcgcccccagccccatcctaccacagtcagccatgccgcccatgtgaggcctcgcctgctcactgggatgccctcaccctctgcctgagctgctcccctgcgtgtgtatttcctctttagaattaaattctgaattctattatccaaaaaggttaaaagtaccagcatgctgggcacggtggttcacacctgtaatctcggcactttgggaggccacggtgggaggattgcttgagtcctggagttcggagaccagcctgggcaacatagcgagaccccccttctctatcaaaaataaaagaattagccaggcatggtggctgtagtccctgtagtcccagctactcaggaggctgacgtgggaggatcacttgagaccaggaggtggaggctacagtgagctgtgattgcaccactgcactccagcttgggtgacagagctagaccctgtctggaaataaaaagtaccagcagcatatgacttccagtagctgatcagtgattggctcggtgctttccagagcctcctgtccccagtctagggcttctgctgatagaggagccagctgtgtgtgtgactgaggcaaatgtccattttgttggcagatgcgttctgtcttcccttgctgtgctcgacggggcgtgggcatgttaatcctgccgctgacggggggggacttcagagcttgggtgaggggacagtggagctcatactcttcctcctggggaggcctcaccaatgatgccctgatgaagaacaggcccatttctccccgggggctttggtagtcacagagaactcatataaagagttaaacctttgataacttaaaagttcagtcggaagaggggtgatttgtgtagcactttcgaaagtatgttaagattgccacatgaatgttcactgtattcttggttcatcagctcatcagcatcggatcttcctataactacggcaatgaggatcaggcagaattcctctgtgttgtctccagagaactaaataattctaccaatggcatcgtcatagagccgagcgaaaaggcgaaggtaaggagccccttccctgggcagttgcctctggcttgcttgttcgcaccccctccgtgggcttttcctgaactcttgctcctcacttcttccctggccttctagagccagcgttgcattttcccctcgttttgttatttttgactgttgtaatttaattgggatttacggagcactgacaggtgtttttagttagaaaatatgaacctaaaaagggtagactttctccatcctctgccaaatcaatgaaaaagaaaagctggttgccactaattactacagggtaggatttctgaactcagacttggaaggtattttgatttattctttaaaactgtgcttttttcactgcctcaggagaaaagggtgttttcttaccttggtgacctttacctcccttaagttcctggaaaactgtttcttttccctccactgtgcacccccctcacccccaacacacacacacacacacacacacacacacacacacacacacacagcttctaaatcgtggataccaggtaagctggaaccacttcctttcagttggcaaagctttggtccaacagcatataagctttagacccagctgtgcccagcaagagagtgtttcgcaccagaagcactgcgggtgaggctgcggctgcacccctgcttgcttcctgggatgacaggaccatcatgccactcatcgggtccagtggaaagcatcccccgacatctctgtctttccctcagcagcctcagcctctcccccatctccaactttcagattcttcaggagagaggatcgcggatgtaaactaagaccccgaaaactccagaccttcaggagagcagtcagcagagcccctctgtgaagtgaaacctcactcctgtccagtgaccgagccactgcaaagcacagctgatcctggccccctgtgaagaagtgttctggtcaaaactaaaggaactccctccccacctgcaggactccgaagacagtgcgacttctggctgcagaataccttttcagaaacctgctttcatttgcttagccagtattagaacagatctttacaacagcagctgggctgggttcccagtcggagcctttcggggatctgggggatgagggcggaaggcctagctccttggaaatggcctgtactttaaggacgctggagccaagaggattgttcccgtgccgtgccatggtttcaccctatgtgtgccacaatggacgttagcagctgcttcggaacaccgtccctcctatgcaccctccaagacgtgcagcagatgcaaagggttctagctgcagtttgtcgaattgaggttttaggtaaagcatagagttgccagagtaccccgcattcccatgaatagagcctccaaggaaagggaggatggggtgtcctttgttgtggttggaggttggtgatcattgctctggatttggggctcccggctgccaccacatgcagctttgcctcacctttctccagcagccgggaccctctggagagcttgttttccctccaagaagaggtttgagacaggcggcatcctgcactgagtcagacaagtgggagctgtaggaactgcacctgcagcctcttcttactccccattgaccctgtcttccttccctggctttttcaactggaccaaagatgaaggcacttatggaccctttgatggcttggagtggggaaggctgtttctttgaaagttgccaaatgtgttatgttgtgtctcagagagagttatttctgtgactctcttggaaatgccttgactgaatgtgcaatatttgtgtctcttggtttctaaccttggcggacctgctcccctctgtactgtccccagtggtatgtatgtatgtgctaggcagtctggggaccccctgtgtctctgaccacccccctgacccccgccattactttcttttctggagtgccatgctggcgaggatccggatgcggcagcaccctctttcgggctgcatccacagagtttgtgtccacactttctctccgagcatgtgggtctcgctgagcagtcatggaatgcggtagagccaggggaccctgtctgccccgaataactttcagtagtatggcagatggcacagagaaagggaaggggctctggggacttctccttctatgaaagcctcctcgagccaggtgctcctgggcaccttcagaagtgatgtcctgtgtgctccacagctcacctgcttgccaaggtacgtctgggtagtagtttctggaaatgactgcagactgtgccaaatgtcttttgagcttctgacctgaccatgcccagatggcataacttttccctaggaccctcagtctccttgtttctctgtatctgtagcatagcatagaacccggtatacaggggtttctgctgacacatcaacgtctacacacctatgcgccacattttacagctgtaaagtgttagatgaactgccgtcctcagtaaaagcagccaccccttcaagagtcacaggcatccatccagtcgtatctttcagagaaaaaaaaagttagatgtagccaaggaaagtagtgatcacgggaaggactgctctgagccgggtaggatggaggactttggaagaggcgctccttggccaggtccaatgagtaacatcagactgacagaggaaaagcagcttggtttgcggccttgtgcccagtctcgttgaggcgcttgtccctgtctgctttcctggggcatgcctgatcagcgtgggctggagctcctagaccaaccccagctttctcaccaggttcagcaaggaggcctgggggtcagacaccaatgttgagcacctcctgagggcgccgtttccttcattcctcttagattccatagttgccgccatgaaaagactgctcttgagccccaaggcacaggcacgtgctctgggaaatagacaggagtggtatttccgccctctcggagggctggtgttcaccaagtttccctcctcgctgcaacccaatgacacctgtattgttccagcgctccaggactctgggttcttaagatttctgggagcgttgttcacccaccccctttaggaaccaggctggtgttcttgcttgaaagcgttgtgccctctgagtgtctggctgatcacatcagagaggtctgcgtggcagtttggggctgtcacgtgaccagtgacccacactctctgctgcccagtactgccaagtggggagggtcctgcctttttctctgccccaggtctgggacgcaggtgatgccagccaggcccaggagtgcccagcatcccccaactgatgacacagtagcactgattctgtcttttcctcagaatctggcctttttccatggcaatgaggtggggcccagcctcctctaaagtgactttgtttctgcacagttgtaactgctcttggggatgtcagtgaggctgggagcagggagccacgggatgctgagagaggaggcccgagaggacaccccaccctccagcgtggcctttgatccagacttagggacgaggctgtcactggtgggcaccctctgttcctgtttgtgtgtttgaatagtctgaaatgctgtgactttttttgtgtgaataaagatatgaaacttctgaatctcaagaactgtggtgtgttttccattactgcagtctcctggttcccactgtcacttcctgtcgatggttctcacatgggtttcaggagatgacttaactacctttcctaccaggacagctgactaagtccttttctcctgctactgaaaccaccaaagggggtgttgggccttctccctcctccctttcattttactgaatctgaaaagacccagagaatgcagagaaacagaaggtgggacggatgggctgcccaccagagagctggaaagagacaaggggaggagtgtgagattttttttttttttttttttccccgagatggagtctcgctctgtcacccaggctagagtgtagtggtgcaatctcggctcactgcaacctctgcctcccatgttcaagcaattctccctcggcttcctgagtagctgggattacaggcgcctgcctgcgcgcctggctaatttttgtatttttagtagagacagtattttgctgtgttggccaggctggtctcgaactccgacctcaggtgatcctcccgcctcagccccccaaagtgctggggttacaggcatgagccaccatccccggccgtgagatggtttttaagggacaagtctttctggaagagagtgagtgactaggtacaaggaagaggatgagtgaggaacgtttggtgacaaccaacaaacaagtattgatcacttcagcatcaggcggggcatgggaaactcagaaggtgttagtcccttccagacagcactttcaggtagggagacaaaatggactcatacagcttagtgaacaggatgcgtgggtgcatccgtcagggtccaattgagaccacagcagttgttaactggtagtggagaaaggaaagggcaggagtggacactgaggcatcacaatgtagggattgcagggtgcagtcctcactcctgggacctgagaacagtgggaagacattgggattattaaagtggagatttggccgggcgcggtggctcacacctgtaatctcagctctttgggaggccaaggcaggcggatcacctgaggtcaggagttcgaaaccagcctgactaacgtggagaaaccccatctctactaaaaaatacaaaattagccggaccagctactcgggaggctgaggcaggagaatcacttgaacctgagaggtggaggttgtggtgagccgagagcacgccattgcactccagcct[133 bp omitted]acatggtgaaaccccgtctctactaaaaatataaaaattagctgggcatggtggcaggtgcctgtaatcccagctactctactcgggaggctgaggcaggagaatggcttgaacccgggaggcagaggttgcaatgagcagagatcacgccactgcactccaacctggtgacagagcgagactcagtctcaaaaaaaaaaaaaaaaaaaaaagattcacctgcactttgggaggcccaagctgggaggattgcttgagcccaggagtgtgagatcagcctgggcatcgtggtgagactctgtctct[132 bp omitted]gaaaccctgtttctactaaaaatacaaaaattagccgggcatggtggcacatgcttgtaatcccagctacttgggtggctgaggcacgagaattgcttgaacccgggaggtggaggttgcagtgggctgagatcacaccactgcactccaacctgggtgacagagattgtgtctcaaaataaaatggagattcaagaggaggggaccaatggagaaggacgtgctggccagtggcagctgctgcctctcagagggtagagaaaccaccaagaaaccagcaccactcctggaatcagctatgccagcacacagcagtgttctgtggtttggctcacaacaggaaatacatcgtccctcctttttttctctcgtcttgcagtctccctcagcctgtcctaccaggttgagctaggagggggaaaatgtggctcggagcagagttcagagggtgggtttggggctgagagacaacaatgtggtgactggctcagtccacctgtttggttcccctcacatgtacatgcttctgcacatacttgaacttgcataggatggtgaaaaatgctgggtgtggtggctcatgcctataatcccagcactttgggaggccaaggcaggtggatcacttgaggtcaggagtttgagaccagcctggcc[140 bp omitted]ggtgaaaccctgtctctactaaaaatacaaaaaattagctgggcgtagtggtgggcacctgtagtcccagctactcgggaggc[144 bp omitted]cctgtaatcccaggtactctggaggctgaggcaggaaaatcgcttgaactcaggagacagaggttgcagtaagccgagatcatgccattgcgctccatcctgggcaacaagagcgaaactccgactcggaaaaaaagaaaaaaaaacgtggtgaaaaaacaacttcatgcctccatggaacaagatacaactacccttctacaagcaaaaataatctctccttccctccaaaataaacacgaagtgccaagtcattgtatccctgtctcagagacagtcactatttctgagctatgttaattgctcctaattgccaggctcacacctggaatcccagtactttgggaagctgaagtgggaggactgcttgaggccaggagttcaagaccaggatgggcaacataggccccatctataaaattttttttttaattagccaggcgtggtgacacatgcctgtagttccagctactcaggaggctgaggtgggaggatcacttgagccaaggatttcaaagctgcagtgagctgtgccctctagcctgagagacagagtgagacactgtctctctttttttttttttgagacggagtttcactcttgttgcccaggctggagtgcaatggtatcatctaggctcactgcaacctccgcctcccaggttcaagcgattctcctgcctcagcctcccgagtagctgggattacaggcgtgtgccaccacatccagctaatttttgtatttttagtagagacaatgttt[140 bp omitted]ttaccatggcccacacctgtaatcccagcactttgggaggctgaggtgagaggattgcttgaggccaggagttcaagaccatcttgggcaacatagcaagacctgtctctacaaaagaaaaaaatttttgttaattactcctaattcggttggtgtaatacacaacacctagttggtgacgggcagctcaggccacagggtcacttgatgtcccatgaactaggtgttccatctcggtcagggcccagtgaaatagttacttgcaaaagaggacatggacctgcccagaaccctggagttctgcatggccacagtccagttgggacttgcaggaggctctgatacagcatctgtactggcaggagataatttcagtatcactggatctccccagccataaagcccaggtggcagcacagagctaaatttttaataagagtcataccacacagaaagattttcatcagtaaagctttcccctggagtaaactgttactccatgaagccagattaattccttgatcaattttctatacagggcaattaaattgcttctaagttttatattttcattttaatttttacttaaatactttcattaagatcatggttttcctagaatctttctgaacttactct[134 bp omitted]caatatggtgaaaccccgtctctactaaaatacaaaaatgagccaggcatggcggcaggtgcctgtaattccagctactcaggaggcagaggcaggagaatcacttgaacccgggaggtggaggttgtagtgagccaagatcacgccactgcactccaacctgggcaacagagtgagactctgtctcaaaaacaaataaataaataaaaataaaatatcggccagatgtggtagctcatttgtgtaatcccagccctttgggaggccggggcaggtggatcgtattcgaggctgcagggagctatgattgtgccactgtactccagcctgggcaacagagtgagaaaccctgtctcaaaaaaagaaaaaaatatatgcttggccaggagaggtggctcatacctataaacccaggtacttgggaggctgaggtgaaaggattgcttgagcctggaaggtcaaggcttgcttgcttgcttgcttgcttgcctgcctgcctgcctgcctgccttccttctttctttctttcgaggctgaggtaaaaggattgcttgagcctgggtggttgaggcctttctttctttctttctttctttctttctttctttctttcttctttcttccttcctttctttctttctgtttctttctttctttctttctctttctttctttctctctttctttctttccttctctctctttctctcttttttttttgatggagtcttgctctgttgcccaggctggagtgcagtggcaccatcttggcccattgcaacctccacctccaaggttcaagcgattcccctgcctcagcctcccgaggtagctgggattacaagcgcccgccaccacacccggctaatttttgtatttttagtagagacgggtttttgccatgtgggccaggctggtctcaaactcctgaccttaggtgatccacctgcctcggcttcccaaagtgctgggattacaggcctgagccactgtgcccagccgtgtgagggtattttcaaccgtccgtctgtcagctcttaggacacattcccagaagaatagaaagatagtttatgtagaaatacatgtgaagtgtcattagtggaaaaaaaatttttttaaacaaagtatgtaaccatatttagctgtataagagaaatttatttgtgcacacagtataaagttaatttttctttttttttgagacagagtttcacacttgttgcccaggctggagtgcaatggcactatctcggctcactgcaacctccacatcctgggttcaagtgattctcctgcctcagcctcctgagtaccttggatacagacatgtgccaccatgcctgcctaattttgtatttttagtagagacagggtttcaccatgttggtcaggctggtctcgaacacctaacctcatgtgatcgcccaccttggcctcccaacgtgctgggattacaggcctgagccatcgcatccagcctaaagttaattttttcaaggatttaaatacatcttttgtaaggtttttaaaataaaggcagattgagtcaagtttattgaaactttacatggagggaaagaatatgctaatttgacattttagagaagtttaaatgcaagcgtttgttgtcccagcttagagattggtgggtgaggtctgtgtgtgtcattttcatgttccaaaacggtgagctttatcttatgttatttttggtggatgttgacttagttcatgaatgttgtcacttctaaatgtggacagttgggctggaagataacacagcctcttccggagcctagtaatccctgccaagcccccatcagtcatatttctaaatgaagacattattttgttcacatttccttggaagaaaattaagcagctattaaagtcatggtcaccagggtcatgttgtggcataaaaagtactagtgagttaaataaggattcagaattgtatgtatgaaacctctatcaacatatcaaaatccaagcgcatcactttaggttgtgtgactctccccctttcctccattttcctttcttttttttttgagatggagtttctctcttgtcgcccaatctggagtgtaatggcacgacctcaactcattgcaacctctgcctcctgggttcaagcaattctcctgcctcaacttcccaagtagctgggattacaggcacctgccacttcgcccagctaatttttgtattttttgtagagacggggtttcaccatg[133 bp omitted]gtgattcacacccgtaatcccagcattttggaaggccgaggcaggcagatcattcgaggccaggagttcaagacgagtctggccaacatggtgaaaccccgtctctactaaaatataccaaaaaaaataaaattagccagacgtggtgccgcacgcttgtaatcacagctactcaagtagctgaggcatgagaatcaagaatcgcttgatccgggaggcagaggttgaagtgagccaagactgcaccactgcactccagcctgggcaacagagtgagactctgtctcaaaaaaaaaaaaaccaaattgtgtttaatatactgtatatatatatatatacatatttatttatttatttatttatttatttatttatttatttattttgagtctctggatggcagtaactcagtctcagctcactgtaacctccacctgtcaggttcaagcaatcctcctgcctcagcctcccaattagctgggattacaagcatgcaccaccacgcccggcctatatatatatatacttttttttttttgagatggagtcttgctctgtcgcccaggctggtgtgcaatggggtgatcttggctcactgcaacctctgcctcccaggttcaagctattctcctgcctc[133 bp omitted]tgggcctctcaaagtgctgggatttacaggcgtgagccacctcacccggctgacacttttttcattgcaagattttgtagcctcagctactcaggaggctgaggtgggaagatggcttaagctgggaatatggcttcagccagggaggcagacagaggttgcagtgagctgagattgcaccactgtgctccagcctgggggacaaagcgagacactgccttaaaaaaaaaaaaaagactttgtcagtgaaggaaggactacattgatttacaacctggcatgagcttcttatgttgctaagagccagcagtggttcatggacagcacttggaattgcactgttgtgtaatataacaatgaaaatccccgttgctgggataggtggagactaaaggcttatgtgggacttgggcctggcagcactgccgcagggcgcccacacggctgtatacctgctatgccccttctggccctgctgcctcctgagctctccaaggccctttcctgtggcctgaaaccctatgatcatcactgttaggagcaaataacctgattccttcgaattagagacaggctctcagggagtgggagcagccctccaagcagagggctaggccgtgggccatccagcactgcaccctcattctcattaagctgagcagaagaatgaatgagggatgtctcttctgggctcggacatgggcctgtttgcagtagggcttctctgaggccacctctctgaatcaggggcccctcctcctctcccccaacaccttaccccaggtcgaggttcaaaaggtccaggacactgtggggaagcagatgctgatcatcgctgctgacggccaaaagcaccagggtcgggtggcctttctctcagtaaggttggcccaccccaccccaggcccaggcttccccagtgccctgcatcaggctgcagggacctcccaggactctgagtggatggcatgggaccaggcagtcagggacaggatgcctaggtgggctccgggctgtgacagtggtggtgctggagtggagctcacggacgcctctctacacaccccacaacctccaggaactgatccagacaatgcgaggtgaggcgaacacccacttctcggagatcatcaggaggtcaaacagctgcagatgcagatcttggatttcgtggagaaagaggaagcagccgccctggggatgctgagcagctccatccagcagagccacaaccggctcctgaagctggaaggagacagcgtctggctccacaccctgctcatcaaccagagtgaccagcaacgtctgcaggcaaggtcccagccctctgcctctggctcaggccccatcgcagcttccactctccctccacccacaaacacatcagatctcggtcgggagtggtggctcatgcctgtaatcccagcattgtgagaggccgaggcaggcggatcacctgaggtcaggagttggagaccagcctgaccaacatggtgaaatcccacctctactaaaaatacaaaaattagccaggcttggtggcaggcgcctgtaatcccatctactcgggaggctgaggcaggagaatcacttgaacctgggagacggaggttgcagtgagctgagatcatgcattgcactccagcctgggcaacaagagcacaactcca[150 bp omitted]aaaccccgtctctactaaaaatacaaaaattagctgggtgtggtggcacatgcctgtaatcctgactgctcaggaggctgaggcaggagaattgcttgaacccaggaggcggaggttgcggtgagccggagattgcgccactgcactccagcctaggcaacaagagcgaaactccgtctcaaaaacacacacacacacacacacacacacacacacacacacagatcagcctttagggtgcatcactgtgtccattcccctgcctcagggagcctccccattccaggtcttctgtcttgagcttgcacgaacacccttggctttctccacttcagagctcagccttaccctaactttcctgccttggttttcctggaacacatgggattccaggcatctagcacagcctaagtttctccagacttccctggatcatggctgagagtgagaccagaacaatctgtatagcctggattgaaatcccttttccagcccaggaggtggaggttgcagtgacccaagactgcaccattgcactccagcctgggcaacaaactaagactctgtctcaaaaaaagaaaaaaaaaaagaatcgtgaaatcccttttccttccccaatcctggcctggccctgaagcctggactgatgctgctgtaagtagcgggtggggccaagcagcagccttttctggacggtgcctggagttgcccaaaccctgtgcttgggaactccagcttcctttaagctgccatcacaccctgggcagacatctagggcaactgctcactttgtcccctgtgcacaatgggaagcatttggcaatggcttttactaagcagttcaaggcacaacaaaaatcctcccatcattttctgaaaatcccctttgcctaatgcacactaggccacagtggccaagcccttggcaaagccctgacctctgatgtccaaatagctaggaggagggaaaggagatgcccaggtttggaaaggggaagcttctgctccaccggcccatggttctggaggcctctgggcctgtggcatcggcctaggtcctggctaacaggtggtacctctggcccctccctgcatccaggggttcctccgactgaagcagttctcagcctgcatggaacccctgatgggcatcaactgtgaggaaacgcagagcttcccccagctgccagagaccctggctgagctctggatgcggctgctggacatgggcctcagcttctttaaccagctctcaaagttctgggattacaggattacaggcgtgagccaccgcgcctggccttttttttttttttttttttttgagacagactctcgctctgtctcccaggctggagtggaatggcgccatctcggctcactgcaacctccccctcctgggtacaagtgattctcctgcctcagcctcccgagtagctgggactacaggtgcctgccaccatgtcttgccaatttttttgtatttttattagagatggagtttcaccat[138 bp omitted]cgatgttagggtctgatggcgggggaggagggcgacctggggcagcacccactcaccctccaggctgtgtctgagcagcgggctgagtttggggacaggagcgtgggtggaagcatcccctgacttgtatgcaaatgccttgcaagccagcgtcctgccctggaggctgctgaccctgcttccccacctccacccgccaggttactgcaacctgaactttgaccccgccaccgccggcgacgagctgttccagctctaggagacccgctgggtgctgaacctggggatcctcctggagcccctgacagggggcggccccttcccgggcttcaagcagtgaccgcagatgctgtgctcgcgcggcctgtccgagggccgccactaggacgggaggtggaggtgtccaactcgtgggtgtgcctgggcgtcacctacccccgcagctccccgctcggcggccgcccgagccgcagcgtggtctacctgctgggccgcaaccccttctcgtggtgcctggagtgggacgacaacgcgcagaccgtgctgcacggcgcctaccaccgcacgctgggcgtggcgctcgactgcgacgccggcggcttgtccttctacggcctggcgggtggcgccagcctcttctaccgcttcctggcagccttcctcgagccgctctaccccgcggtcatggtcagcagcggcgcctcggccacgctcaagcggcgcccggagcccgcgccgcccgtgacagcaccccataaataaacctggacttatctaagcgctggctggcgcgccaggacggttcccggccctgcgccatcccacctcccaaaacgcaggcgaccctttctcgccacagccacaggagggctctaatccggctagagttcccccaggcactggggacagtcccgtggccttgtgggtgggggattcctgactgcggtgcacagcccactcccaaaccccatcccagcagcgtcctctggccttggttctccaggctggtcttggccgcttggcactggggcctgtgccaaaggccttgtcgtctgagagggggcaaggtttgggccaggtggtcagactgagaggtggcgccagctggattggggtacgggtgggctgtctgagtggcttcattgtcgcctgagaggttaaactggaggagcccaggcctacctcagatccaaaaatgttgggctggggacccaagcccaggcaggggtggggctgctgcccagagcagagctgctcactcagctggtgttttacagcccagagggggtgtgacactatcgcgggtgagtaaaccttaaaccccctccaccctgctgagtgctgctgaaagctgctcccccatccccagccatcaccaacccactcagctcccagaaggtagcactgctcacagcagaggggctacgtccatatccaggcctctgccatgcgaccagaggctgaatccaggccgagaccctgccaggggaccctggccaggccatgactgagaactcagctcctctgtctggggaagcggaagatttgggtgcaccatggagccacctccacatttccagcctcaaccagccacttgttcctgtggcttctcaagcaagggttctcagcgaggttaatgattggctctgaagaggaactgatacaaatcactgaagaaaaaaatcccaagggcaacgaattccagaaccagcccacgcggtgccccaggggtgttcctgaattccgtctccacctggcctgttccgggaaaaattagtgacccggtttttccttcaaggtggtcattttggagccaggagggcacagggggagcagagtgttctctgaaggttggtgggggcgggggggctcctctgaggaagccctggctacagcctcgtggtagcctttctccctggagccttcgctcagctctgagcccagtgactcattccccacaggctgctgcccctgtgaagtaaggaatgagctcgaattctttgccccttattaaaagaccttttacccaaaatccacatcttgcctccccaccccacagtcttcctcctggcaccagtggccacaggcttctgcagaggagcgctcaggtcaggaaatgctgaaaaggtgagtgcatgacccaagtgggtagcagcagccgcatacatctcagagtcttcccacatcacggggctggcaaggacaggggcttcctcgccaagtcctccccgctctgaaagacacttggtggcaggatggtgcgtgacaccctcaggcacacatccaaatgtcccggggatgatacttgctctcaaacagctgttccttatttgggggagtcctgggcccccataggtccgcaatggtggtcctgagggtcctgaaactcttttcagtatttccacgagccagatggcaagcaggcctgtgctttcaaggaggcaggttagcaaaccgaatgtcagggtgtctggtctctgcctggcctgttcctggagaaattagtgacccaggtttcagcctgtgcttcatgggggaaaacatcacagggcgggcaggcgtggtggcgcatgcctctaatctcagcattttgggaagctgaagcaagaggatcacttgagcctaggagttccagaccagcctgggca[154 bp omitted]cagatttgtttacagcctgtttggatttagcctgagtgctaaagcaggaccggaagagtgagtgggtggcattcagggacagtccctgccctgggccccacagtgggggaaaagggaggggcagggtccactgatgtgggttattcatgagcactggctgaacttgctgcccccaaagagcccttctgtgatttttttttttttttttaagcaggttctccctctgtcacccaggctggagtgcagtggcatgattacagctcactgcagtctcaacctcctgggctcaagcgatcctcccgcctcagcctcctgagtagctgggaccacaggtgcaggtcaccatgccaggctaatttttcatttgttgtagagatggggtatcactatgttacccaggctggtctacactttctgactataaaagtaattctgcatttatgtaatgtacttccatagtgcctacaatgtgccagccaccgttcatagcaaatagaatgttaataagtatgaacttgccaggcaaggtggttcacgcctataatcccagcactttgggaggccaaggcgggcagatcacctgaggtcaggagttcaagaccaccctggccaacatggtgaaaccatatccctactaaaaatacaaaaattacccgggcatggtggtgtgcgcctgtaattccagctacttgggaggctgaggtaggagaatcacttgaacccaggaggtggaggttgcagtgagccaagatcacaccactgtactccagcctggggacagagggagactccagctcaaaaaaaaaaaaaaaaaaaaagtacgaactcattcaattctcataaccctacaaatatgtatcattaattatccccatttgtatggttgaggaaactgagggatgagaggataaaggacttgcccgaggtcatgaaggtatgcaagttaggaagccaggattcaaacccaggcagtctgcttttttaatcactgtactacaccacttctcttataatgcatacattgtagaaaatctacacaacatagaaacacataaaataaaacctgctgggcatggtggctcatgcctgtgaccccagcactttgggaggccgaggcaagtggatcacttgacgccaggagttcaagaccatcctggccaacatggcaaaaccccatctctactaaaaatacaaaaaattagctgggtgtggtggcgtgcacctgtagtcccagctactcaggaggctgaggcaggagaatggcgtcaacccagaaggcagaggttgcagtgagcagagattacatcactgcactccagcttgcgcaacagagtgagactcccatctcaaaaaagaaaaaaaaaacactcataatcctacccccaaaagatagcctctcctgcagtatttccttccagtctataatagacagagcaatgtaacagctgcaaatgtaggaagctagaagacagagtaacaggtcatatggtacttttttttttttaaagagatgaagtctcactatgttgcctaggctggtctcgaactcctgagctcaagtgatccacctcagcctccctaagtactaggattacaggcatgagccaccatacccagcctgagccaccacaccatatggtacattttcaccagtatccatactgtgcatattttcccaaattactgtcaaaatagaaaaagggcttgtttattttaatcatgagacaaaaacgggcttgttcactggcagcatattattaatacatcctacaaatctgtccaatagctttgttttgtccttaatctcttccctggttcccactacaagtgggtgacaagaggcaacccagtcaaagccatatatgttgcttcctggatgttactccaagtttgacccagactcctcgggagggtccaagtagagccaaagaacctggaggcatcccatcatcccattttcacaggcgggaggaagcagggagcaagaccagatggcaggagactggggaaggagcctttaaccctttcctcccaagggcagtgtgctcagggctgggctggaagggagagggtgtctgtgggaacctcaacagaggccctgcctggcataccatgggtacccgatgactgtcaggagcatctttcccaagagaacataagctcacctctgcacttttcctgggatggaaggcagctgatggcaacccggaccaggctccaccagctaaggagaggtgggccgtcttcagcccgccctgccagcccagtccttcccccatttctttccagctccctaccatgaacacctgtctccataactcccattgtcttcatcaccagcccccttcatccccactcttaccccactccattccacccccaaagcatcccacctcctggcctttttgctcatgccgtcctctctgcctgaagcacccttcacacccaccccctgcttgtgttattcccactcattccctaagactcagctaagtgttccaggaagtctcagtctccactctccaagccaggcgggtttgcctcgcatctgctccataataccctttgcacatgtgccccctgccacccacgttgtcctgtttcatgtgtgaattcaccatcagactcaggggtcagctgggtatgtcatgcctatgactccaatgcttcacgcgtgcctgacacacagcagatgcttaatagtagtggacccgagaactaaggaacccttccagaggttggaggttggggaccactgcagatcccttcctgggccaggctgggtgtggatggcccaggcatgcttgcttccctccttccttcccctctcgtgccatccccttcgtcccttctgaagctgagtccatgtacccactgcatctaggcaggacaaagaaactgcctgtctccttctgtgtccattttgacctccctgtagcctgaagattcttgagcctgaggaccctcctgagcaggtgggtcaggggagagacacgtgcctctcccagcctgttgcctgatgtgtaaaacggcatgcatagggatgccattcatattgactgaggcttatatgactccagggcttctcagatgactagggggttgggaaacacaggcgttgtgagcggggcagtgaccagagtgaggaaagtgagacagtcacctggagtgcaacatttaagggaaggcatcaaaaacttagcaatcaagataaattaaataatattggccaggcgtggtggctcatgcctgtaatcctagcactttgggaggccgaggcaggcagatctcctgaggtcaggagtttgagaccagcctggccaacatggtgaaaccctgtctttactaaaaatacaaaaattagggaggctgagacaggagactcacttgaacctggaaggcagaggttgcagtgagccaagatcacgtcattgcactccagcctgggcaacaggagtgaaactccctctaaaaaaaaaaaagaaaaaattagccagatgtggtggcgcatgcctgtaattccagctactggggagtttgagacaggagaattgcttgaatccaggaggtggaggttgcagtgagccaagatcgtgccacttcactccagccagggcaacggagcaaaactcggtctcaaaaacataa[136 bp omitted]cactgaaaccccgtctctactaaaaaatacaaaaaattagccgggcgtggtggcaggcgcttgtagtcccagctactcgggaggctgaggcaggagaatggcgtgaacctgggaggcggagcttgcagtgaacggagatcgcaccactgcactccagcctgggcaacagagcgagaatctgtctcaaaaaaaaaaaaagaacagatctgacctgacctggcactccctgccaaactcctctcaaaggaattcactcgctggttccaatgaaattttattcacaaagccaggtaactgccccaaggcccatggattgctgatgggattttctaacaatattgcattaactttttgtcttaattactgagcttttttggtgtcccctaatattctgagccggaggtgagtggctcagtcacctcatcctagcaggggatgtcacagacaaggagggggtgtcagggatgccaaatgttctgcaatgctcaagtcctgcccccaacacagatagcgcccctgttgttggtaatgtgttggtatagcaacactgcgtgaaaagtgatgaaaagtgaaataacattcctggagccagttgctcactcttgccaaagtaaattagaatcaaagtgtcagaagtcagtgtcaggggcactggttagaaggcttttgggtccttgccaagtgtttctggaagctgcatctttctcgttgacatttcctgtctggaggtcaaaggccttgttgcctttgagtttcacacagcgaaccacacagctggagatggttcaatttctgcccggtttgcttcagtgctctgtaagtgtcccgtgagtggctcctgtgggccaggcacaaggctccgcagggtgggtgcggtggggagcaacgtagatccattccctgcccccaccgcagctcaggggtttgggggaacagaccctaaggttggtcacagtggtgcccacactaagctacacactgagataaaggcttttcagggctgggcgtggtggctcacacctgcaatctcagcactttgggaggccgaggcaggcggatcacttgaggccaggagttcgagaccagactgaccaacatggtgaaaccctgtctctactaaaaatacaaaaattagccaggtgtggaggcgggcgcctgtaattccagctacttgggaggctgaggcaggagaattgcttgaacctgggaggtagaggttgcagtgagctgagatcgtgtggttccactccagcctgggcgactgaccgagactccatctcaaaaaatatatatatatatatatttccatccttaaagtaaacaaagataggacacaaaaagaatgaactgtaggaaaaaaatatataaactggacttcatcaaaactaaaaacttttgctcttcaaaagatactgttaagataattgtgctggtgccgtggctcacacctgtaatcccagcactctgggaggccaaggcaggcggatcatgaggtcaagagatcgagaccatcctggccaacatggtgaaaccctgtctctactaaaaatacaaacattagctgggcatggtggcacgcacctgtagtcccagctactcaggaggctgaggcaggagaatcgcttgaaccttggaggcagaggttgcagtgagctgagattgtgccactgcactccagcctggtgacggagcaggactccatctcaaaaaaaaaaaaaaaaaaaaaattggttgggcgcagtggctcacacctgtaatcccagcactttgggaggctgaggtcggtggatcacttgaggtcagcagttcaagatcagcctggccaacacggtgaaaccctgtctctactaaaaatacaaaaattagccgggcatggtggcatgagcctgtaatcccagctactcaggaggctgaggcaggagaatcgcttgaacctgggacacgaaggttgcagtgagctgagattgtgccacggcactccagcctgagtgacagagtgagactctgtctcaaaaaaaaaaaaaaaagaaagaaagaaattgcggtttaggggtcatgcagcccctggctgcaggagtctgaatcttcccagattgctcctggggataacatcattattgcaaaatctaagatcagtgcttgagatattttgtagactctgaactccatggatcagctgacaccacccagactggtaatctgactcagccacttctgccatccaacccaggaacagaggacagcaagaaaacctcacttcaaccccttatgagtccatctccaacctgaccaatcagcactccccacttccccagcacctacccaccaaattatctttaaaaactctgatccccaaatactcagggagactgatttgagtagtaataaaactcccgtcttccacgcagccagctctgcatgaattagtctttctctattgcaatcccccgttttgataaatcgggtttgtctaggcagcgggcaaggtgaacccactgggtggttacagtggctgaggtcagtgagtgaggaagaatgatttgaggccagaaaggtgggtaagcgccaggcttggaagggccctgtagccaccccaggggctcaccttcatctccaaggcctgcagggtttcagttttttgtttttttgttgttttttttttgagaccaagtttcactctcatcacccaggctggagtgcaatggcacgatctcagctcactgcaacctccacctcctgggttcaagtgattctcttgcctcagtctcccaagtagctgggattacaggcatgcgccaccacacccggctaatttttgtatttttggtagagaccgagtttcaccatgttagccaggctggtctcgaacttctgacctcagacgcccctcccgcctcagcctcccaaagtgctgagattacaggcatgagccaccgcgcctggccaaggcctgcagggttttaagcagggttggcagtagggcaagatcaggcttaatggatccgaaagatcagtcacctacagtgttgaaaaggaatctgaggtctgagctggacaacgggtggcggtggatggtgtggggatggagatgagggtaaatggtcaggtttgagaaacagtaagggggtaaagtgagtgggacgtcgttgtggattggttgtgaaagaggcaaaggtcaaagagactcatgggatttggcccaggcacctaagtagatgtggtgctgtaatttgctcaagcatggagcacataaggtatcccaggtttagcagggggcggcagaggacagtgtcaatggcaagttccggtcagtgttgagttttaaaggcctttgaggcacacaaggataggttccaggttgaatatctggactggacataaaaggcaccggatcctgagtatacagggtgtggttggagtcaccatgtggagtgagaagagggagggtgaaggtctgaggctgtgaaactccatcgtccacagatcaaaaataaacaaggccgggtgcggtgctcatgcctgtaatcccagcactttgagaagccgaggcgggtggatcacctgaggtcaggagttcaagaccagcctggccaacatggtgaaaccccatctctactaaaaatacaaaaattacccgggtgccgtggcgtgcacttgcaatcctagctactcaggaggctgaggcaggagaattgcttgaacccagaaggcggaggctgcagtgagctgaggtcgcgccgctgcactccagcgtgggcaacagagcgagactcccggccaactgagtacatttcaactaatgcacatcaaggactacccaggtaggggaagagggaaaaacctgaaaagggcctgtagttctgagggccacatgcagaagtggtgggtgtcctctcacctgctcccagggctgaggggtctgcctgctcccctacaagggactgcctggactcccaccggcaggcgcagccctcaaagctcgaggctttcattggaagggctcctgggcagggaaaacgcagaaagaagggatcctcaacctcgggctctgcgccttccccaccccacttcctgggaggtgtggtctctttatggcatgttatctccgccccaagcccggggccctagaccctgagccgggaaaaccagaagctagaaagagggcatccgggttgtgcaaatttcagacacacggatatcccgtggcgcctgcgtccggagcccggccctgctgctggactgtccccggccacgcccgccgcccctcccgcatcctggccccttccccacccgacggaatcccggggaggctggaaggtgggtccccgcccacaccgccctgggcccgccctgcctggccgcggcgcttggcccagtcccgcggtcctcgtcgcgaccggcccgggccgcaggacgccgcgctcgggggagctgagccacctctccgccaggcccgtgcgagcgggtgagcgggccccccgggccccactgcctcggacgcgtcccctcctcgcccagtcccctctagcgctgtcgcagacctcctgccagggccccaggtctcctcccgcctgggcgggctcagtggcggtgaggatctagaaaagtcttcctgtcctggttctgggctgccccggggcctggggtgatgacccgcaagcccaagggcgctcggactcctggcccgaaattccagggcggacacagcccgggatcccagcagccccaactcggaggagctctgccccggggagggagggacagcggagtggaaaccagattccggggcagcactgcggggatgggcagggcgagagtacggcatgaggtcccagttgcctgtcccaaacccttgctggttttgcagtgaatatggggggataaggggaagggagagagtgatttgccccagccaccccacctctggggctgcctccctcctccctaggccaaccacagggttgagggttcctcagccccaagctcaagcctgcccttgctgctctctgctggacgggagcccttctgctgcctgcctgggtccagggctccagcccaggagcctacttgatatgggaaggagggaggggtccccagggcctgcctcatttccagcccggggctctcccaccatgggagaagagctgggaagaagaagaggaggccccctcgactctggacaccaggcccctaacacgagacccctggatgagagcatccgctctcccgtgaccaggcgttcgagctccaggggcagggaaaggattcccagggcctagtgaggcccctgttatcagatgaggcgccctgaaaacataggctgggcttgtgtgagatgggagaaagaccagaagtatcgtctaaacttctccctgcccacacatccagcttcatggcactgtgctacaaagctggtctcattgggcctaggggtctttgagagctgagcttggcagcccctggggcccaacctcacccctagtcccagcaagtgagagcgaagcatcttgccctgtctacctccttgcccaaagcacacaccaggcagtgaccatgactcatggttcccagtacaaagaaaagagcacttccctgctggggcagaggccaagccagagccctggccccatcacctctctgccctgcttgagtctggaatggacctccctgcctggaagctgcattgcccttggtcctgggcctgcctgccccctggggaacacaggtgggtcacattcatctcctcttttgtgctcagccagaggctgggtgagggttcatgaacaggttcttgcttatagtgtggaaggggtagcagggtggggggtgacaataaagaagggggtgatccactccagtgtggtgtgaggaccactattaaggtgagaaaacaggccaggtgcggtgtctcacacctgtaatcccagcactttgggaggct[134 bp omitted]gaggcaggagaattgcttgaacccgggaggcagagattgcagtgagctgagattgtaccactgcactctagcctgggagacagagcgaaacttcatctcagaaaaaaaaaaaaaaaaaaaaaggcgagaaaacaggaaggaggtgcagcccagcctggggtgggagtcaggttagctcccaggatgctgctagggctgaatcttcttttaagactactcaggagcggtagtaagaaggagggaaagagtagaacaaggagatcgatctgtacctgcctgtgaacaattaactgaaattactcactacctttgcacccgcctaaggggtgaattttttctttttttctttttcttttttgagacagagtctcaccgtcacccaggctggagtgcagtgacgtgatctcggctcagtgcaaactccgcctcctgggttcaagggattctcctgcctcagcctagttttttatttgtagtagagacagggtgtcaccatgttggccaggctagtcttgaactcctgaccccaggtgagccgcctgcctcggcctcccaaaatgctgggattacaggtgtgagccaccgtgtctggcagggctgaattttgaaagaccagttgactggagaaaccgctcgatgggaggggaggctggagagccgactgggcatccataccgtgtatgtgacctgggacttactgggagtgggagaggagacagggaaggccatgtctgcagtgggggtcccagagaggcgggggaagggggtcctcagaccttggtggcagagtttcttttcttttcttttctttttttttttttttgagacggaagtctcactctgttgcccaggctggagtgtagtgatgcgatcttggctcaccataacctccgcctcccgggttcaagcgattctcctgcctcaacctcccgagtagctgcgactacaggcgagccccaccacgcccggctaattattgtatttttagtagagacggggtttcactatgttggccaggctggtctcgaactcctgacctcgtgatccgcctgcctcagtctcccaaagtgctgggattacaggtgtgagccaccgcacccggcctggcagcagagcttctagtgtgcaaaggtgcataagggttcctgggctcggattggcctggggcctggagagaggagatggtcaggaacagccagctccactgaaaggttccggagggaaggtgggattcagagtgaaggtcacaggagcctgggcaaagtccccaaaaacactgccccaaaaagtggatgctgagaagagctcttctcatagaaagagacttctccatagacttcttcctggcagagcaagaagggaccagagccaggcagtggggagagggagcagggctggggtccagcctccaggcctcccaaatgctaccagggcctcggggcctgggagtgccagggctaggtggcagggaacaggcaaaggcaggaggaagccaggaaggctgtggcctttccgggaggaagaggtgagagtatcaagtgggagagcggaagagctggggaggagaggcgagctatggagcagggctggaaccttgacatcggggcaacacagaggatcaggtggcgcctgtggcctttccgtttgctgagggaacagaaatcttgggagaggccagggctagtttgctggagaagccccatctgcgatattgcctggcctggagctgggccaggaggagggccaggctgggaggatctctagccagaggtcgcatgcagagggcaggagggcaagcagtgctccgccttgcacatgggtcacacaccctcacaccctgaggctgcgatgaatgggacggtcaccttggtggggctcccagggtcctctgggagggcggaggattggagacagcaaaggaggcagttcagagtggagccggcttaggtgctgctttaaaactcctaggcctggagggaagcagtggggtgctgggcttggcaggaagagggggtttcatatttctggtagatgtccgagtttccccagagcttcccaggacctggggtgaaagggagggaggctgtgggaacagcagctccgggatgcgtgggcttcactgaggtggaggctgctccctcgcagtgcctgctgcagcctagagcccccaggcggtgaggtctgagggggttggggggccagggcgcaggaggcaggataggagggggttgaaaaaggggtccaaacttggtgaggggaccttgggactttggaggcctggttatggcagcttctgtgatgaggggagtggcctgggtggtgttgaactaagataggactggctgcaccttgctaagccaaagatgtgaggggggtgtgtgtgtgtgtgtgtgtgtgcacgcatgcgcagatgtgcatgtctgcactgtgtgtgtccgtatgtctgtgtagcatgtgtgactctgagcatgtatgcatgtgtgtacatatgcgtgtgtctctctgtgtttgtgtgtaactgtgtgtgtgtctgctagtgtgtcttgtgtacctgcttgtatgcctctgtgtgtgagttcgtatgtttgcattgtgtgtgacggtacatatctctgtgttcgtgtgagtgtctacgcatctgtgtagtatgtgtctgtcagtgtctcttcgtgtctctggacttttttgagtgtctaagtgtgtgtctttttttttttttttgagacagagtcttgctatgtcactaggctggagtgcagtggcacgatctcagctcactgcaacctccgcctcctgggttcaagcgattctcctgcctcagcctcccgagtagctgggatttttgtatgtttagtagagacggggtt[133 bp omitted]ccgtgtggtctttgtgtgggtcagtggatctctgtgtgtgtgactatccaagtgtgtgtctctgtgtgtgtgcgtgtgtctgtatgtttctgtgcttgtctgtgtgagtgtgcgctgtgactgtgtttgtgtgtgactgggtatgtgtctgtgtctgtgtgccactgcgtgtgtgtgtgtgtgtgtgtgtgtgtgtgtgtgtgtgtttattattcagtgtgattgcggaacttgagtcttggccttgagctctgtttgaaaggagtgttgcagggtaactgcaaaggggccgatgggaaaggcctgggggtgtgggggtggatgaggcccatgctttctccaaagctgctggttgggtgcttgttaaactcctttgtgtatgctctgtggctgctcctagcaccggcctgctcactcaggccttcacaacagcaccaatagtaactttgctgcttctgaggcattgcgaaagtctgtgtttgtatgcaggaaccctgggcaggagggtgtatccttgggtgcatttggggggcgttgggactacactgaccccagaggtctgctgcattctacaagtagtgactgagtgggctaggaggtccccctgttgacttctaagtgatgtaacaattagagacaattgtaccccattgcctggtgccacctgccctgccccgtcctgtccctcctatccctcctgtccctcctgtccttcctgccacctcctgccaggctggctctgggaagtgggtgaaaggagatgccaaggccaacgcgtgggcctctggccacctcccaggggtggtgcccctctgtgacacctggtacttgggtatgaggaagggatggcttagctgcccagagaaggtggcaggtgggccaggagagacggacagcctgctgaccaccaggctccattctgtcccctccccaggcagcagccacattggcagtgaggccgtggcagcgtcggcagcagaggatgccccaggccctggagcgtgcagatggcagctgggcctgggtggtgctgctggccaccatggtgacccagggcctcaccctgggcttccccacgtgtatcggcatcttcttcactgaattgcaatgggagttccaggccagcaacagcgagacctcttggttcccctccatcctcacggctgtgctccacatggcaggtgagcggcctagggaggggccgatgagaaagtcctaggggttgcggggaagccacaacctccctggccttctgattccctctctctgaggccacaggctttgcctcctgggtgaattcctaaggtttcaccagatttcaccaggggcccctggctggaatccagctggactgggctggagccggggagagagtggggaggtgcctgggttgcaaagccaggcggagccttgcgtcctttctgtgggatccattccgacacaggcgtaggtgtgctggggcgctcagtgccaggctgggaagagcgctggggccagcccaccaagactctcctgctttccagctggctggtctctctgaacctcggttgcttcctctgcaatctgagggtgatgcccggcatcctgcccagctcccacatggaatagcagggaagaccactgtcttccctggaggtgctgggagctgggaaatgtatgcggctgtgaattattaatattttggagaccctcactagggcagggagtggcttcaggat[137 bp omitted]aaccctgtctctactgaaaatacaaaattagctgggcgtggtggcgggtgcctgtaatcccagctactcaggaggctgaggcaggagaatctcttgaacccaggaggcagaggttgcggtgagctgagatggtgccattgcactccagcctgggcaacaagagtgaaactgtctcaaaaaaaaaaaaagacaccaggaacaagagggggacaaggcaggagccccagctctcccgggactccctgcagagaggaggttgctaagtgggggtgagggaggaaggcagcccctgtctgccccttctcctggctctgtcaccataggcctcagaggcccatgttcctggctggcttttccaggagtgtgactgcctcaccctgaccccagcgttgggagcagggcagagggagggttctctgcagtcgccgtggacacagggacctgccctcagctcctgggagctctccagggagactgcagagaccccggcctcggaggggcccggtggacagcagcccgagctgatggcccacaggcctctgcaggcgtgtgtctgctggccgcagctgcccatctccccggctacctcctggctactccctccacttgccaccagcagcctgcctattattccaggtcctgccctcaaactgggagggaggtgaggctcggagaaagcgccaccctcctgggtgagctctgaatctgccacatggcctctggcctgcagggttggggcagggagtgggaatcccagagggctgcttctcacacaggcagagcagggttcctgggccaggggctaggaaccgggcacccggcggggaacctactccccagctgacttgcggctcaccacccccagcaggcatctcagcatctccatcagcatgggattcctggctggccatctctctcatgtacacatacacgtgtatgagcccgtgctcattcagagtactgtagacattttattttatgtttatttatttatttgcttatttttgagacagagtctcactctgtcacctgggctggagtgcagtggcatgatcacagcctattgcagccttaacctctcaagctcaagcgatcctgccacctcagcctcccgagtagctgggaccacaggtgtgcaccaccacacccagctaattttttttttttttagatggagtctcgctctgttgcccaggctggagtgcagtggtgcaatctcagctcgctgtaacctccgccttccaggttcaagcgattctcctgcctc[168 bp omitted]caccacgcccagaccatacccagctaatttttttactttttgtagagacggggtctcactatgttgctcaggctggtctcaaactcctgggctcaagtgatctacctgcctgggcctctcaaaatgctgggattacagacatgagccacggcacctgaccacagtattgtagaaatttttaaacacgatgaatcatggatactttcactgatcctttcaagtgcccctgcccctacctacgccttttagaggtaaggaaagcaagcaggcacagaacacaagacctgcccaaggctgaagagtgagttcacggcagaggaaacaccctgtgtcccgcccggccacaccaccctcagctatgcagctctggcctgcagcccagtccccacccccacccctgtgactaagggctttccccaatgtcaacttccctaagtcaggccagagtctctggcgtgaggaagctctgtgggtcagtcctctccagagccacctccccctctacaggggcagagacgccgggccaccagcctctgcttgattatgtctgcgacgggctgctcacttagtctgtcacttgcttttttcttttttttttttttcggagatggagcctccctctctcacccaggctggagtgtagtggcacagtctcggctcactgcaacctccacctcccgggttcaagcgattctcctgcctcagcctccctagtagcttggaattacaggcatgcgccaccacacctggctaatttttgtatttttagtagagatggggtttt[143 bp omitted]agtttcactctgtcgcccaggatggagcgcatcgggttctgcctcccaggttcaagcgattctcctgcctcagcctcccaagtagctgggattacaggcacgcaccaccatgcctggctaatttttgtatttttagtagagatggggtttcaccatgttggtcaggctggtctcgaactcctgaccttaagtgatccacccacctcggcctcccaaagtactgggattacaggcgtgagccaccacacccagcctactctgtcacttttatactcacactggctcacaccacacatcccccctccaccgcagacacacacaagcatctcatgcgcacacacttccctgtccctttagttgcactctcggagagtaagttagagaagctccacatgtgcttgggtgaatggggcccctgtgaggtgccaaggagcagtctgcagctcttttctatttttttggggtgtggattggtgagaaagcagctgggagccaggcaaggaacaggcccccctccacattgagccaaacctctaggtgcagactttggtggtgctggaggtggtgtgggaggggagaacctaccctgcctgattgtctgcagaggccagtgcaaggaggcgcagaggggcccagggttcccctcagctgtagggctgggaaggtggtgggagggtgggagggatctagccagtcttcctgaggatgttgggtgtggggatggggcaggtaaaacaggatctgaaggtgcacactgtagtctagatgtcctggaacactgccccgactcctcccaccaacagacccccagcgaagtgggggaggtaaactcatgaaccaatcctgtttcacccggatagaatgagcagcctcaggtctgtgtagttcagggtcttgctccacctttcagggaatcctcatcagggtcaaacatcgcccattctgaatcctcactttgtaggggaaaaaattgaggcacggagagggatcaggctttgctcaggccacatggccagtccatggcaggtgggtatcagaatccaggcctgctcgtgcccttgaaaccacctggctagttccagctggaactgccctctccagccactctcctcctctcccgccacctcctcattcagctgctacctgctggctgtcttctcccacagggcccctgtgcagcatcctggtgggacgcttcggctgccgagtgaccgtgatgctggggggcgtgctggccagcctgggcatggtggccagctccttctctcacaacctcagccagctctacttcacagcaggattcatcacaggtgactatcacttcatctccagaatttataggcacctgctagaaagtgccaggcacaagtggacagggcaggcaggcctcttaatcttctggaactgctggctgggtgcggtggctcacacctgttatcccagcactttgggaggctgaggcgggcagatcacctgaggtcaggggttcgagactagcccggccaacatggtgaaaccctgtctatactaaaaaaaatacaaaaattagccaggcttggtggcgggcccctgtagtcccagctactcgaggctgaggcaggagaatcgcccgggaagtggaggttgcagtgagccaagatcgcaccactgtactccagcctgggcaacagagcaagaccccatctcaaaaacacaaaaaacaaagtgctgggattacaggtgtgagcccatcatgcccagccctttcacggcattttgttttaaggggactggaggaacagactatacccagaagtggttatgaggtcaagacaggctttttttgtttgtttgtttgtttgtttttaatgggagaaataacgaaggagaaggatctaggaaagaagagaaaaaggatgatgcaggagagaggggacttgctagaggggtgcctctgagtggagaggatgcagggcagaagggagggacagccactgggggaatgggcaagccattgtcactggctagcaggcatgtgggcagctgagcataaggatagggaggaggtgttggggggcacagaggaagacaccggtagtcacctagcagggcaggcaaggcatgattgagggagctgtagtggcgtcacaggcagcctgagggcccgcctgaggccacggtcacacatgattgagaactttttctccagcatgctcaggtgtgcaggtgcagacactgagtgggtggggagcggggaaggcccctctggagaggtggcgtctgaactgagaggagagtggaaagtctggaggaagcagattccaagaaggaacagcagctacaaataacccgaggtaggggcagcttcatgtccagaggcagagaaagaagttcctgtgtcttgatcctaatgagtgacagggagcagcctgagatggcatctgagaggcgggctggagccggaccacagagagccttccagggcattgtggagactgtggattttttgtcaagtgtgatgggaagtctttggaaggtgttaagccaagagagacttaatccaatttggggtttgtttgtttttgagacagagtctcactctgttgcccaggctggagtgcagtggcacaatctcagctcactgcaacctccacaacctcagctcactgcaacctccacttcccgggttcaagtgattctcctgactcagcctcctaggtagctattacagactacaggcgcctgccactaagcctggctaatttttttgtatttttagtagagatgggg[140 bp omitted]ggaacagggatgccctggcagccttgggagggcagatctggggtggggtgcctacagggaggtggcgaggccagctgattccatggtcagtccccagggacttggagctgggtatggactagaaccagaggagggcaggtgtgtgaaatgaccactgaccccacccctgggtgcaggtggaaggccccagtgcgcctccaggctggtttcccctcttgccccgcaggcctgggcatgtgcttcagcttccagtcaagcatcacggtgctgggcttctactttgtccgccggcgggtgctggccaacgcgctggcctcgatgggcgtctccctgggcatcaccctctggccgctgctctcccgctaccttctggagaacctgggctggaggggtaccttccttgtcttcggcgggatctttctccactgctgcatctgcggggccatcataaggcctgtggccaccagtgtggcccctgagaccaaagaatgtcccccgccacctcccgagacacctgcacttggctgcctggctgcatgcggccggaccatccagcgccacctggccttcgacatcctgcggcacaacacaggctactgcgtgtacatactgggtgtgatgtggtccgtcctgggcttcccactgccacaagtcttcctggtgccatatgccatgtggcacagcgtggacgagcagcaggcagccctcctcatctccatcatcggcttcagcaacatcttcctgaggcccctagccgggctgatggcaggacggccggcctttgctagccaccgcaagtacctgttcagcctggcactcctgctcaatgggctcactaacctggtgtgtgcggcatcaggtgacttctgggtgctcgtgggctactgcctggcgtacagcgtgtccatgagtggcatcggcgccctcatcttccaggttctcatggacatcgtccccatggatcagttccccagagccctgggactcttcactgtcctggacggccttgctttcctcatctccccaccactggccggtgaggagctgggagggagggcagccagatagtgtggtaaaaggggaacagtttagacagatctgggcccagtccagcatctccagaggttgtgctacagctggtttccaacctggcactcagagtatgaacagttaaaaacatgggtttggcccggcgcggtggctcatgcctgtaatcccagcactttgggaggc[136 bp omitted]gaggcaggagaatggcatgaacacaggaggcagagcttgcagtgagctgagattgcgccactgcactccaggctgggcaac[183 bp omitted]agctgggtgtggtggcgggcacctgtaaatcccagctacttgggaggctgacaccagagaatcgtttgaacccaggaggcagaggttgcagtgagctgagatcacgccactgcactccagcctgggtgacagagtgagactccatctgaaaaaaaaaaaaaaaaaaaaaaaagcatgggtttgtgtaccaaacctcagtcctccatcatcctccctgtacctcctttttcctttttgttgagacaaggtcttgctctgtcacccaggctggagtgcagtggtgcaatcacagctcactgcagcctcaacctgccagactcaagtgatcttcccacctcagccccccaagtagctgggactgcaggcacatgccaccacacccagctaatttttatattttttatagaaatggggtttcaccatgttgctcaggctgctctcaaacccctaggctcaagtgatctgcctccctcagcctcccaaagtgctgggattacaggtgtgagccattgcgcctggccacttcctttttcctatcagtaaagtggggataaatagaatctacctccaaggaaagagcttaggagagagtctggtgtgcagtcagcatcctgcagagtttcctgtaatgatcatcccagttctcctgcttcctgcctgtgggacccaggcaagtctttttccctttttgagccacagtgccatctgcaaaatgcagacgagagcacctgccctaatcatttattcacctctgccagcctctgggtgtgcatggggatcaaaaggtctccattcccagcctgaccaacatggtgaaaccccatctctactaaaaatacaaaaaattagccgggtgtggtggtgtgcgtctataatcccagttacttgggaggctgaggcaggagaattgcttaaacccgggaggtggaggttacagtgaaccaagatcacaccactgcactccagcctgggcgacagagtgaaactccaactcgaaaaaaataaaaggtccccatcccctgggggattaccttctagggcaggagtcaggagtgaaaacaaagagacacatcagcaaccatcctggtgatttatgatgcgagggaaaccaaatagggaagtagaggtgcacgtgagaggcagctgagagtgtgagattctgagcaaatgagggcaggtttgtaaagccctcggtaccggggagcagtcagacaacacaaggcggcggttattagagtagatccgggaggttgagttcagcccaatggggactccgtccaagtgtggcgttggaaggcccagtttccaagggaattcttttttctttttttttttttgaggcagagtctcgctctgtcatccaggctggagtgcaatggtgtgatctcagctcactacaacctctgcctcccaggttcaagcaattttcctgcctcctcttccctagtagctgggattacaggcacgcgccacacgcccggctaatttttttttttgagacagagtctcgctctattgccaggctggagtgcagtggcgtgatctcagctcactgcaacctctgcctcctgggttcaagcaatcctcctgcctcagcctccagagtagctgggactacaggtgcgtgccaccacactcggctaatttttgtatttttagtagagatggggtttcactgtattggccaggctgttctcgaactcctgacctcgtgatctgccggcctcggcctcccagagtgctgggattacaggtgtgagccaccgctccctgccttagtttttgtatttttagtggagacagggtttcaccatgttggccaggctggtctcgaactcctgacctcgtgatccacctgcctcagcctcctaaagtgctgggattacaggcgtgagccactgtgcccatccaagggaattcttttttttttttttttaatggagtctcactctgttgcccagactggagtgcagtggtacgatcttggttcactgcaacctctgccatccaggttcaagtgattctcctacctcagcctctcaagtagctgggattacaggtacctgcccccacacctgtctaatttttgtagttttggtaggaacagggtttcacca[138 bp omitted]agaaggaggcataggtgagacctggagggtgggtgagcaaatatcccagactccactagttccctaccaccacatgcccttaagttctcttgcagcctgaggactcttcctgcccaggccagaggaggttgtgtttcttcccctcctttcattcttcaagtatctgttgagtgtctactgggtgtcagccacaattcctagtacagcagagacaaaaataaaatacctgctgtcagggaacacacagctgagttggggggaggcctggtagcactggcctaacttgatctctgttccccagggttgctcctggacgccaccaacaactttagctatgttttctacatgtccagcttcttcctcatctcagctgccctcttcatgggtggcagcttctacgccctgcagaagaaggagcaaggcaagcaggctgtcgcggcggatgccctggagcgggatcttttcttggaagccaaagacggtcctgggaagcaacggtcccctgagatcatgtatgtaaccagcgtctaagacccagggttcatctgtgtgaccagtgtctgagtcctgggatcactgagtgaacactgtctcagcccagcccaggagggggacctctagctccttcaccaggggcttgggtgaagagtagcccaggaagcccgggctgtccaggctctgcaagctgggactctgccaggagctgggactttggaggctggcctctgaagatgccctgagaaactctttttttttttttttttttttgaggcggagtttcactcttgttgcccaggctggagtgcagtggcaccatctcggctcactgcaacctctgcctcccaagttcaagggattctcctgcctctgccccccaagttcaagcgattctcctgcctctgccccccaagtagctgagattacaggcatgcgccaccactcccggctaattttgtcttttagtagagatggggtttctctatg[138 bp omitted]gccctccggacttttttccttgggtaccagggtactcggggcccaggaacctgggtctgagccctgctcaggtttgtcccagccggctcagcgcagctggctgtgtgttgctgctcctacagctcaatgcactggaccttctcgtccagcctggatgcctctatcatttctctttgtctttctctggcctccataccgttctgaagagctcaccttcctctaggttcctcctgccctgctcttcccaagtgacccagccctcacctgtagggcagccaaggctggtggtgcagctgcccccagtgaaggtcattgggcctcgcactgggcagtgcagaggtccaggctgaggagttgagtggcgcgcccatcctggcgcctgtgcagagaacgggaggggggcccctggcttggatcctagaatcggtgaagtctgagggcccccctgcagtctcagcaggacctgctctatcaaggggcttcctccttcctttccccaccctgtctccttggcggggaggattagtgccaggtgggggaagccagacatttgactgacgggagaggaaggcttgccaggcagcccgaagactgttgtgaaaatggggctgcttttgcaagggaagctcttttactccccattcctgtcctccagaggccccccttttccctgccgtgttattggtgtcaaccctggggtaagtggctggctggactcacccctgctccccgtacacctgtgcctgtgactggcggtccaagctccccacacacacatcttgctggtgcctttccctgaagtcaccacccaggggctggctgtcatcagcccattcttgtcccagcagggtaccgagggaatgataaaacagaatgtgtttgaattacacacaaaaatgttccctgcagcaggtcataaactctgtgaactaatgaagctgacaaacagagctggagtacgtttcccctcacccttcctttcctcctagctcagcaaggggtgctcaggttcaggatgttgtttgttgattcaggctcaaccaggctccgcaagaaaaccttatcaggagattttattttcatgaacaggtgccagtcttcccgccagccacgtccagctggcgtcaataagcatctttggggatgtcctgcctcctccaggaccagccatgagtggctcttatggccaaaggcggtactgcaggccaagcaaacggctctgggctggaatagccctacctgagtgccctgtttgactccgccactatctgccatgtgagttgggcaaattgttgaccacctctgagccttgaaaaagtaggaggttactttgttagagcaaaataataaaatttaattttaaaaaagaaaacgtaggaggttggtttggatgagctagtctcttccggttgaaaagtctgactcggtgagcatcctgacgactccatttccttctggctccccacccagtcttacacttggctgccatcaataccacatgctctgaagggagagtgcttgcatggactttgccaaatcctgtctgctccatctcagttgaatggaaaaggagggaggtggggctggtagataggtgcttttggtgctagtatccaccaggttttgtgtgcatcccgtaatgagcccacttcctgaaaacatttaaagaaaaaagatatcagctggagatggcagtgcgcacatgtaatcccagctactcgggaggttgaggtgggaggatcactcaaacctgggagtttgaggccagcctgggcaacacag[131 bp omitted]ggccaacatggcaaaaccccagctctactaaaaatacaaaaattagccaggcgtggtagcagtcgcctgtaatcccagctacttgggaggctgaggcaggaaatttgcttgaactggagaggaagaggttgtggtgagctgggatcacgccactgcactacagcctgggtgatggaatgagactcgtctcaaaaaacaaacaaacaaaaaaaacactttgggaggtcagagcaggaggatcgcttgagaccaggacttcaagaccagcctgggcaacatagagaccctgtctctacagaaaaattaaggaaagggaaaaaaaaaaagccaagtgtggtggatcatgcctgtaatcccaacactttggaaggccaagatgggagaatcacttgagaggccaccctgggccacataaggagacctccatctctacaaaaaatttaaaacttagctggacatggtggcacaggcctgtagtccaagccactcaggaggcagaggtgggaggatcccttgagccaagaagctcaaggttgcagtaagctgtgatcacaccactgcactccagcctgggtgacagagaccttgtccccccttcccaaaaaaaaaaaaggtatcaatgaatgttctgcataggaaactttcatctcacctgctcctaggcaagaatagcaatcatctctgggcagaattccttcaataaatatttactgagtatctactgtgtgccagagactgggcagaggtaagacctaccaagggctgagaattccaccccaaggagggcccctccctgaggccttaagaagggagaagactggctgggtgcggtggctcatgcctgtaatcccagcactttgggaggctgagacaggtggatcacgaggtcaagatatcgagaccatcctggccaa[184 bp omitted]tggcgggtgcctgtagtcccagctattcaggaggctgaggcaggagaatggcgtgaacctgggaggcggagcttccagtgagctgagatcgcaccactgcactccaacccgggtgacagagcgagacactgtctcagaaaaaaaatacaaaaattagctgggtgcagtggtgcgtgcctgtaatcccagctactcgggaggctgaggcaggagaatcacttgaatctgaggcggaggttgtagtgagccgagatcgcaccactgtactccagcctggcgacagagcgagactccatctcaaaaagaaaaaaagggagaagaccaatgagggaagatggggtggcccatctgattcagcaatccccatctagctgattgcctgcgaacctctagagaaggtctggggcagttcctgggcagggagggatggagcttacttccatcctccctgtttctgggctcctatttgctgctctgtccagcaagaggcagagaaaccccttgggcacctaggggtaagatgcacttcccaggctgcagaggctcccaagagaagccaaagggctttggtgagggtcctggggcctaggtacccagactaagttagaaactcctgcctcagagggtgtacatagggcaggggctgaccacaaggacctgaaacctcagaggtgaggcctgcttccaatggggctgcagctggctggagtgtgacggccactctgccttcatccgggcccagggcttaagataatggtccttgcctttgtcagcctaaataacagagaggctctctcaaagaaaatgatatctatttgggcatagggcattgcaatggtagtatccatgccatagtaaactatatgggtattcagggaggtaaaggaagacaggctttaagggaaaaaataggattacataattgttttgaaatatttatccttaggtagaaggattaataacaagggtgaccgctcaaggttggacaagcggttgctgggcagatggccattcaaaagtatgttttgtgcaaggttgtgacgccctttgtgcaaggttgtggtttttgcagagtctttgtgatagttttcattatcaggtatttatgcacgagaaccctcttgtcatgggtttcttgggctgtgtccgggtttttttgttctgttttttaacacaagtgactccatttagattaacaacttttgcactctcaggacactcacagcctaagccacctctacccctacgttgtcaaatgcgatgggagtgtggctagaccacctccttccctggtgctttgtttcctgtaaccacgagcaatctatcacacacccgcttcctgataatctccgagaaggaatcggccgaagggcttcagcatccagaaagccccgaaagcgccacaatcaaggctcctcctcgggctcccccgtgctgccccgggcgcgcgccatccacccggctgacaaaaagcaccaggacatgacccagtaccctttgatttctgtccagaggtggcggacccacctcggggctgggatggagggcgggtcggggtcgctaggctttttgcaaaaggggcaaaggactgatggggggcgtaaggagctgacgcccgcgctccaaaggggcgtcctggtcaaggaggatgggccgcgcccccgccagccgtggggaccctggaggtgcttctgcctcgacgtcctccaacatgggtgctgccagactctgctgcgctcctgagttgctcctggcggaattccagccacccgacatgggtgtctcattttcggcttctgggccatgtcgggacggcggaggaccccgggggaccggcgggagagtgggaaaggtggggcgggaaagccgagcgaggccctcactcgcccatctgttggcgggggcggcaagtgggtttctttcttgcgttcagattttgcagtaatttgcatctggacatgggatacgggaggccaggctgctcctcgcagtacacccacccacgcctgcacctgcctcagcgaagccgctcgccgctggttccagcacaggctaaagagcttcggcatccagaaaaccagaagcgcgccgcgcacgcgcgccaaggagttcggcgacggccccgccccttcgggggtagggacagcgcggcttccgccgggagcccggaaccgagcccaggagccggggacggtgcgccagtgccccctccgcgagccccaaccagtagacggttccctgtctcccgcgccccaatttcgattttcaaacgcaactcctacaggattctgagaccccgtcccatctcccatatcccatttccagctgcaaattactgcagaatctgaacccaggaaagaaacccatttgccgaccccctcttccctctccagacaggtggagagcgggtgagggtctcgctcggctttccccctgcacctttcccaccctcccgcccgtccctgggggtcctccgtcaccgcggccatggcccagaagccgaaggtggacccccacgtcgggcggctgggatacctgcaggcgctggtcacggaattccaggagacccaaagccaaggtgagagccacggtgggatcaggtggcagggtccgctgtgaccgccgcccggacctggcttcagtgccgctttcccgttgcagacgccaaggagcaagtcctcgccaacctcgccaacttcgcttatgaccccagcaactacgagtatctgcggcagctgcaggtcctggatttatttctcgattcgctgtcggaggagaatgagaccctggtggagtttgctattggtaagggcggggcccgttccctagatgcctaaatgggccagggtgagataagtgaattagaagtgagtccttggggccgggcgtggtggctcacacctgtaatcccagcagtttgggaagctaaggcgggcggatcacctgaggtcatgagttcgagaccagcctggcccacatggcgaaaccccgtctcgtacaaaaattagctagacgtggtggagagtgcctgtaatcccagctactagtgagcctgaggcaggagaagcttgaacccaggaggcaaatgttgcagtgagctgagatcgtgccactgcaccacagcctcggggacaagagtgagaccccgtctcaaaaaaaaaaaaaaaaaaaaaaaagccgcacacagtggtgtgcacctgtaggcccagctactctggagactgaagcaggaggtattgcttgagtctgggaggcagaggccgaagtgagctgagattgtgctactgcactccagcctgggcgacagagtgagaccatgtctcaaaaaaatatgttttaaaaagagcagttttgtagccgggcgcggtggcacacacctgtaataccagcaccagcactttgggaggctgaggtgggcggatcacctgaggtcaggagttcaagatcagcctggccaacatggtgaaaccccatctctaactaaaaatacaaaaattagccgggcatggtggtgggcgcctgtaatcccagctacttgggaggctgaggcaggagaatcgcttgaacccggtaggcagaggttgtagtgagccaagatggcaccaccgcaccccagcctgggcaacagtgagactctgtctcaaaaaaaaaagcaatttcaggcgggtgaggtggctcacacctttaatctcagcactttgtgaggccgaagcagggagatcacttgagttccggagttcaagaccagcctgggcaacatgacaaaaccccatctctgctttaaaaaaaaaaaaaaaaaaattagtctggcgtggtgtcccagctactcaggaggctgaggtgggaggattgcttaagcctgggaggtcaaggctgcagtgagctgggattgggccactgtactccagcctgggtgacaaaacgagaatctgtctcaaaaacaaaaataactcatatttagtgttttcatatcaagagaagcagagatggcttgcagtctgtaacttatggcttctgtagttgttatgatcttaagacctattgagttattcactgggtagatatttattgcgcgtgtaccgtatatgcaagctactgctctaaatgctggagtatggtgaacagcttagggaaaggtctttgcccctcaggagcttacattctagtaggggggacaggtggttagcaaacaaaaaagatgatgctcagaaggaagtaaatggggtgatgagagacagcagtggaaggtgggggttacttcagttttggccatcatgagaaaggcattttagccgggacacagcatgggcaaaggccttaaaacaggaaggagccagacggaaggctgatgtgggaggatcgttgcagtgaagtggagaatggcacaaaaagagtttagagagttcagtggcaccagagcttgcaggagtttagatctaggccgtgggaaatagtttgaagcaaacaaaattttgagaacaaacaaaaattcctttttcaagcaatgcagtgcccacctgtagtcccagatactcaagaggatcgcttgagcccaggaatttgaggctgtcgtgtgctgtgattgcacgattgcacctgtgaatagccactgcactgcagcctggccaacacgcgcgtagtcacctggctgaagtcttgtcaggcttctccactgtaaaattactctttctttcccctctttacgtatgatacccattggaaggaagtcactacataaattatcttaaatctctctttttattctctttttcttttttttttttttttttttgagatagggtctcactctgtcacttaggctggagtgcagtggtgtgatcatagctcaccataaacttgaactcctgggctcaagcagtcttcctgccttagcctcccgagtagctgtgactacaggtgtgcaccaccatgcccagctaattttttttttttttaattttttgttgtgacaggatctcactgtgttgcccagactggtctcgaactcctggccccaagaaataaatcccttgtaaccctaaacagaccctcatttcataacactgattctcgaaggccccaaccaggaatgcaaatgttcccccttccggtttgtctcattgcctctttgtggtttctttatcccctttatttcctataatccagaaattgggttgaatgtcttgataggatcaaataacacattttttattttattttattttattttattttattttttgagatggagtcttgctctgtcgcccaggctggaatgcggtggtgcaatctcagctcactgcaacctctgcctcctgggttcagacagttctcctgcttcagcctcccgggtatgggattataggcgcccgccaccacgcccggctaatttttgtgtttttagtagagacggggtttcaccgtgttggccaggctggtctcaaactcctgacctcaggtgatccgcccgcctcagcctcccaaagtgctggggttacagtcgtgagccaccacacctggcccaactaacacat[137 bp omitted]gcctcccaagtagctgggattacaggcgcccccccaccaggcccggctaattttttgtacttttagtagagacggg[148 bp omitted]atccaggtctcctctaaagaggagaggagattcctggggccagactacaaatgagggtcttctctccatgagggggctccagcacatgtgtgtgcggattcacacccccacagacagctgccccttggccactccctgggtttggaagtgcacacaccaacagtggcattcactcctgggagtcaggatccaagagagaggcccatgcagccgtgggagcaggtttagggcctggagctccaggtgcaggggaaggacggctgtgggctttgggtgagctccctggacttactgccccacagaggaccagagtggggcctgctaaagccaagccagggcaggagccccagttgcccaggtccccgagtgatgccagctcctctagaagattattatgccaaacaaatattctaaaaagttggtctctaaaacgtcctccgtcccgtcccttttcgtgcctctgcccccacagctgctgcagtctgaacggtgacggtggcccctgcagaagcatgtggctaaatctccaccagggggcgatagagctcctccaaatcaagctgctgcccctggagaaaaattggcggaagtcacagagcagtccccaccaaaagtgtttaccaagtggagtctttcctgctggcgtttcctcagggtcaggaagcaactttcccaggacaggggcaccctgaggtccgggtccactgagctatgggggcggcgtgggcctgggctgggttcttgccatcctgggcagcttcccggcgtgggtgactgagcccgggtcctggagtccgcggtcccagcgtctccacttctcagctgattcctagaagctgagtcccgtcccttctccgagcgtggtttcctctcccgccttgcctgcgtcgcaagcagttgtgggagcagaagtgtgtctgtgcatctgtgtctctgtgcaggtattttagaattgttaggatcattatcaccagctttacttttcccaaccatttttttcctcctttttttctcttccttcttctgccacagcaagacccccccgccccaagcacagtagctttctcagcgtcgaatccctccgtgggaccatgttgcaatgaaatttcaacatgcaaatgaaatttctcgaaatttctcttgtgtttattatgcatgactgagaaggagagcccccgcgtattttcttactgccgtcgtttccctttctcttagtgtctctgcttggggatccccgacaggcacttattctgctgtttctggagaaggctctgtgctgcgctttggagctttgagtcttttatccgatgtggcagccctgagattgtgatctccctgagccagagccagccttacttctgtctgcatggtttgagtgcttaggccttttggcctagggaggaggaaagaaggggaagaaaaggcaggagatcttcacttaataggtgtggagtcctggccatgacttggtgcaacacccctgagcagggttggttctggaaggactggcacagtggagagctgagtcagattgcccatggctgtggctcgcagaaccaaaaccaagctgggtatggtggctcacacctgtaatcccatttgggaggccgaggggggtggatcacttgaggtcaggagttcgagaccagcctggccaacatggcaaaaccccgtctctactaaaaatacaaaaattagttgggtgtggtggcgcacacctgtagtcccagctactcggaggctgaggcagaagagttgcttgaaccaggagacagaggttgcagtgagccaagatcacgccactgcactccagcctgggtgacagagcaagactctgtctccataaaaaaaaaaaggaaccaaaaccattgtctgcttggttgagcagggtggttcatacctgtaatcccagcattctgggaggctgaagcaagaggattgcttgagcccccaggaggtcaagagcagcctgggcaacatagcaaaaccctgtccctacaaaaacaaacaaaacaagtatctgcttgttggcaggcagcacagtgagttggatgagagctgggccctggggtcaggcaggcatctgggtgtgggctctctctcctccaatcatctgtcagatggggacagtgccagtagctgcttcacatcagttgagagaattaaatgaaacaccacagtgctcttttagggttagtgtctgcagccatagataggattcccttggttgccatccaaagacaaatacccaaaaccctttgagggtgagctgtcgccccttgtcccagagaggtgaggtgcgggatgggataacgtcctatcaagggaatcactcatctgctccaggaattcttaccttctggaaaaacatcacggaatgacaggaacaccgatcctcagcctcccagagggtgcccaggcaatgtcaggtggggagagcctggctgcaggcccggtgctgttgtgcccccatcacggatggcattagctcacacttggggagcacccactgcatgccaggcgcttgcatcttgtgcattggacatagtactaaagtagatgtgcttacaccgccttctttccaatcaggactctgaggcttagagaggttctgtgggctggccaaaggtttaaagagtaccagacctaggccgggcatggtggctgacgcttgtaatcccagcactttgggaggccgaagtgggcagatcaccggaggtcgggagttcgagaccagcctgaccaacatggagaaaccccatctctactaaaaatacaattagctgggtgcggtggcacgcgcctgtaatcccagctactcaggaggctgaggcaggagaatcgcttgaaccgaggaggtggaggttgaggtgagccaagatcacgccattgcactccagcctgggcaacaagagtgaaactccgtctcaaaataaataaagagtaccagacctgagacttaaacccagagcagtcagagtctacaagctagtcccttggcccttttcctgcccttagaggagttccaattcctaggattgtggagcgaaagcgagaaaggagtttactccaaattgctcattttatcaataaggaagctgcggtgcagacagctgcccctcgtctggctgtcgcaggccaggatgagaatgcaggcttccttccgtctgtccctgcagccaccacactcacaggtacccttccatgctggctttgctgtggcagctctgagtgaggtctgctctttggcccagcacttctgcctcctctctgagggctggaagctggatgctatccaaacaaatggattcgctcaccctgcacactaaggccaattactgacaaaaatcgcagtgagaaagtgaggctttgtttttgtttttggttttggtttttttgagacagattctcactccgttgcccaggttggagtgcaatggtgcaatctcgtctcactgcaacctccgcctacctggttcaagcaattctcctgcctcagcctcctgagtagctgggattacaagcacccgccaccacacccagctaatttttgtatgtttagtagagacggggt[145 bp omitted]atccggcagctcatgcttaagacccaaattcccagatggcttatggttaagggtgttcaaaggcaggaggcagaggttacagacaaagttttaaatcaacaccaggaggctatatattggtttggcctaagaaggcaggatgtctccaagggatggggcacagatcataggtggcttcaaagattttctgatttgtgagtggttaaggaggtgaagctttgtctacaaatttggcatcagcaaaaaagaatgttagctataacctgtgggcatgtcctccaggcccctcagggagtctaaagagtggtcagagtgtagttttcagttccccttatctgaggtctcagtgccaggggaattgtttgttgagggtccagatttctgaaaagcaactcaaggacagatattaagatgttatctttaggccgggtgtggtggctcacacctgtaatcccagcactttgggaggctg[133 bp omitted]tgaggcaggagaatcgcttgaacccaggaggcaggcagaggttacagtgagccaagatcgtgccactgcactccagcatgggcgacaaagcaagactgtctcaaaaaaaaaaaaaaaacaaagttatctttagtttctatggggaaaccagacatcccctgattctgacttccttggctattgttttaagctaactattaccttcttgcttatcgagttgctcacttgcttctcagggctagctaggtgcctggaatttcatgaagggactcaagattttcctttatttccatgcttgggggcctgcaggcccctagagaagcccctgctctctctccatgtcagccagggcttcagtctggcctcaagtgttcccatcagcggtggcagtggaactacagtggcagcaaccacttgccaacaggggcctggcctcactcaccgtcgtctctgtgtggcggtctctttctcctgtggcttcctctcagttgcccgccgtcggcaccgccacagccatgaggaaggatccggctacagcgaccgcggagaacacgcacgggttttcaagtctctggcctcttttgtggcctcttgtggatctgcccatttagagcaattgtagaactagtttattgaccctttctgtgcttctggctgccttttctgcccagggtccagggctcctgtttgggtgctgttgggataaaagctgcctctcctggatgcccgcccagtgcacaccatgtgctcgccacacgcccacctgaaccagcctgtccacaaggcctctgaatcggtcatgaacggcaaggccgatggttctaacccctttgtacatatcgggaacccccaccaccaagtgagggcaagtccactgcctggggctcccgctgttagtgataactggagccaggacttcgcccctgtcatccaggatccaaattctgtgccctgggaacccagctggcaccaggctcagactctagtcccttgttctggcctcaaactcctgggctcaagtgatcctccgaccccagcctcccaaagtgctaggattacaggcatgagccactgcacccagccccagtggcagttcctctatgacactggtacactggactgtacactggtacactggtacactggactggtacactggactattcacaggggattatttgttcttgggttttccttcagtgtcttgaaaatggctccttcaatttcaagtctgaaggacagacagtacatagagtaagctaccctttgtgtgagaaggcagggtggagatgaacacacctctgtgtatgcactcacgctggcaagacacaaaagtgtaataaggaaatgggttagtacgaggcagggaacaaggtagaagggaccagaatggtggtgagacttctg[139 bp omitted]gccttcccagcagctgggactacaggcacccgctaccacgcccagctaattttttttgtatttttttttttttttagtagagacagggtttcaccgtgttagccaggatggtctcgatttcctgaccttgtgatccgcctgcctcggccctctcaaagtgctaggattacaggcgtgagccaccacgcccagcctgctgtgaagactttgaccctgggctgcttcagctcagcatgggcgagtccccagatgtagctgtattttgagctgcccttgccgagggcctgcccagccaccaggtgccaggtgccagctaagcacttgtcagaagcatcacctcgttttgttttgtttttgagatggagtctcgccctgttgaccaggctggagtgcagtggcatgatctgggctcattgcaacctccgcctcccaagttcaagccattctcctgcctcagcctcccaagtagctgggactacaggtgagtgccaccatgcccagctaatttttgtatttttagtagagatggagtt[132 bp omitted]ccttcaaccttcccttcatggtccaggttgtccctccctgcaccagtgcccaacatggcgtgtgagctgaggtcacccacctgacctccctgagtctccggctttctcatcttgctttcatgtggggtttcctcttttgcctctccagggttctcgtgtagagttcctgtgtgtcctgatgtctggaaggccctgcccttgcttcttgttttctctctgtcttgtgcagagcatgttcatcaggaagtcggaacttgttctcctttctgtt[136 bp omitted]cccatctctactaaaaatacaaaaaattagctgggcatggtggcgggcacctgtagtcccagctactcaggaggctgaggcaggagaatcacttgaacctgggaggcggagattgcagtgagctgagatcgcaccactgcactccagcctgggcgacagagcaagactcggtctcaaaaaaaaaaaaaaaaaaaaagattgcagtatgatcaacagaataaaatgcacatatcttaagtgtcagtttggtgaattttgaaattcattgagctatgtgtacatccatgtaagcagctcctaaaccaagacgtagaaactcccttcacacccacgctgggtcagtatctcccactccaaggcaaccactattctaacctctatcctgtggatttgctttgcctgttcttgaacttcatacaaacagaaccatgcaggatctactctcgtatctgatttctttcactcaacattatgtttttcagattcatccaaattattgcagtatcatccattcctttggatgtgccacaatttgttcatgcatctgcctgtagacggagatttgaattgtttctagtttagaagctttatgaatgaagctgttaggatcatgttcatacaaatatgtactcatttctctcacctaggagtggagttgctcagtcctagggtagatgtgcgtttaacgtcatgagaagctgccaaatcactttccacgtagttacaccaggttatgctatatgctccacttccttgccaacacttagtattggcctttttttgtttgtttttgagatggagtctcgctctgtcgcctacgctggagcacagttggcacaatctcgtcttgctgcaacctccgcctcctgggttcaagcaattctcccacctcagcctccggagtagctgaggttgcatgtgtaggccaccatgcctagctaatttttgtatttttagtagagacaggttttcg[131 bp omitted]gagtgtgtagtggcatgttcttgtggttatactttttatttctctgatacgtaatgagcacagttccatatgttttggcccttttgcaaagaagactttgtttaagtctttttgctcattttcaaaattgggttgttcatcttttattgatatgcaggagttcttgatgtgttctggataccagcgttctgtcagatggatagtcagtgaatgttttctccttttgcctttttactgtgttaatggtgtcgtttgatgagttattctcctatctcagtgaaattcagcttttaaaaaagaataacatctggccaggtgtggtggctcacgcctataatcccagcactttgggagggcgaggcaggtggatcacagggtcaggagttcaagataagccaggccaagatggtgaaaccccatctctactaaaaatacaaaaggaaattagtcgggcatgttgacgggcgcctgtaatcccagctactcgg[132 bp omitted]attattattattatttttgacggggtttcactcttgttgcccaggctggagtgcagtggagtgatctcggctcaccgcaacctccgcctcctgggttcaagcgattctcctgcctcagcttctcgagtagctgggactacgggcgtgtgccaccacgcccagctaattttttgtatttttagtagagatggggtttcaccatgttggcaaggctagtcttgaactcctgacctcaggtgatcctcctgcctcaccacccaaagtgctgggattacaggagtgagccactgtgcctggccctggcttttttaatttttaaaagaatatctgtagagataacgttttcctatttattaaacacctgctaatgcgaggctgctgatagagaatgagacaaggcagagtccccattctcacggagtttatagtttagtggagcaacagccaatattttgacaaataactactgtaatgtcagtaagtgtgaaggaaagaagcaaagcctggtgaggggggcgtggtgggggggcaggttaggtgctcacagaaagctcttagaggaggtggcgtcttagcgggcctatcttattgtatgtacaatctggtgtccttcttccctccttcatcttaaattacaggcattttctaacatgaattattctttggacactttttttttttttttttaatttttgaggtgaagtctcactctgtcgcccaagctggattgcagtggcacgatctcagctcactgcaacctccacctcctgagttcaagcaattctcttgcctcagcctcccaagtagctgggactacagggacacaccatcaggcccagctaattttttttttttttttttttacttagta[137 bp omitted]tgagaccgagtttcgctctgtcgcccaggctagagtgcagcagtgcgatctctgctcactgcaagctccacctcccgggttcaggccattctcctgcctcagcctcctgagtagctgggactacaggtgcccaccaccgtgcccggctaattttttgtatttttagtagagagggagtttcaccgtgttagccaggacggtcttgatctcctaattttgtgatccaccgcgcccagcctgaagacattatttttaagaactgtaaatattgccagacacaatggctcacgcctttcatcccagtactttgggaggccaaggcatgaggttaggagttcgagattagcctggccaacatggtgaaacccccatctctactaaaaatacaaaattagctgggcgtggtggtgcatgcctgtaatcccagctacttgggaggctgaggcaggagaattgcttgaacccgggaggcggaggttgcagtgagccgagatcgtgctactgcactccagcgtgggcgacaagagcgaggctcatactcaaaaaaaaaagtactgtatactgtttcatcatatgcatgtaccataatttagccatctggctattaccaagcattctaggaagctcccagtttccacgttgctctttttccatggcccttctcagttcttcagggcaggttcacacaggtagacccagggagaagctcaaagcagctgttgctgtggcctcttgtgggtcctctggcgccatcttggctcatctttctgctccagctcagacttcctgccctgaaactctgtgcccttttcttttctggccctcaccgccttcttcatctctaagggacactacccgctaggcagaggagcttcaggagttccctgccactgcggagagggtccaagcagctggtgagctctggcaggcacccggtccatccttggagactcctaggcctctgtgtggggagggagggagagggtggctctcctgaggcctcctcctgcccccaccctctggttttccgcagtctgggtggcagtgccctgcccaggcgcacctgggtgtggtgatgactcagctgccaggcagtgactcaggcttcatcttatcacactttacacagagagaaatcccatcaccccacccgcagtccagtgtgcacaggaaggccgctcccgtcagctcgggagacatgccgcgggtgtgtctgagcagaagagtccgaccacagcacttccactgcccctgctccagactgagcctggcatctgcccaaggctggattcgttgtccttactgcttccagagggccccgccatttcccatgggagggccgccatttcccatgggagggccgaggggcagaaggctcccatctctttagcgttttgggcagctcactcagtctctcatagccttgacttctcccatggaaatgggggtgatgttagcacttgtttctagggttcagtcatgtgtccagtgcgtgctcagtgaagtgtccacggttctaggaacttgagccctgccttatagctcctggtggaagggacagagcaaggacaaaaggcagcctacagaatgccacagccacgctaggggccaccctgtgctttagcaagtgctgaagtgggactggcaagggaggctccaagggccccatggggagaggcgctcagtcagggcctgcttgccctctgctgctgctactctttctcaggactccagagaggccaaagagctccttccctccctcagatgtgtcctgcctgtgagctgcagcccagatctaagaactacagaagtccagggtgggcaggatgtcagggagccacactgtccagccccctgaccatctgcggttctttgaaccctttcccccccgggtcagtgcttaaaggatcaggtgatgaagggctgccctgacatggtagagcacctagtcgggtatcccaggaagacgccacttgcaaggagagcagtggagggcttgttaccagcaagagggtgtcagtgtgtgacaactgggggctgaaaggtctcagggatggactgaggttggagactgcaatgagtgccagggagagggaagaacagacaggacggctcaggggtaaggagcacacggacatctggaatttactccacatgcagtgggatcctttaataatgttcccccagctgggcacggtggctcacacccgtaatcctagcactttgggaggccaagatgggtggatcacctgaggtcaagagtttaagaccagcctggctaacatggcgaaaccctgtctctactaaaaatacaaaaaaaaaattagccaggtgtggtggcatgtacctgtaatcccagctacttgggaggctgaggcaagagaatcacttgaacctggtggggcggaggttgcagtgagccgagatcgcgccacttcactccagcctgggtgaaagagtgaaactccatctcaaaaataaaaaaggttccctcaaagcaggaccagcctgacccaggtgctgcttgggagcaggcagcagagtgaaaccttggcagactcctgccccagtcagtggaggagggtccttggcgggggcaccatgggcacctgtccctctggctggggaagatgtcttagttgggtttcaggttcaggtaagtcttctctttgttagtttccagaaaaacaggggaagtgggtagagctgtggccttcactgattggtcactcaggacactgggcatgttttgcaaatgagctgagaggtggcttcctccactgagcaggaaccaaagggaggggtaccgtgatgacaggaagctcaggatgcacaggaagtcatcttcccgcagggagcagccagtgctgagcagagtgacctccaaaacaaggtagcatctgtccccaaggctaagaggtcattacattgagggggcctgacttgagggaatgggagtgggattccagccacattacctgagcacgtgagttctttgatccagaaccactgatctgtcactgttgccttttctgttttcccccagaatcctagtaacggtgacatggaaataacattaaaatgctctattctcttaattacactatatctgtcaaatggtacactccttaccattaatctacaatcactgcatagccatgaatgtgaatttattggcatggaaagatgttcacaatacattgtttttttgtttttgttttttttttttgagatggagtttcactcgtttgctcaggctggagtgcaatggcgcaatctcagctcattgcaacctcagcctcctgggttcaagcaactctcctgcctaagcctccctagtagctgggactataggtgtgctcaaccatgccccgctaa[213 bp omitted]tgaggcaggagaatcacttgaacccgggaggcggaggttgcaatgagccgcgatcatgccactgcactctagcctgggcaacagggcaaaactgtctcaaaaaaaaaaaaaaaaaaagctggcgtaagccatgcacagtggtgcatgcctggagtcagtcttaactcccagggaggctgaggcagaaggatggcttaaagccggaagttcaagaccagactggacaacatagggagatcccaccccatctcagaaaactgaccaagcagcaagcagagtatcccatttttactaaatacttacatatattcacatatttcaaattgtagaatgaaaaacaaatgttaggtcagccgcctaacattgagacgtagtatttgctctgttgcccaggctggaatgcagtggtgccatctcggcaacctccacctaccgggttcaagctattctgcctcagcctcccaagtagctgggattacaagcatgtgccacaggcccagctaatttttgtgtttttagtagagacggggtttcaccatgttggccaggctggtctggaactcctgacctcagggtgatccacccacctcggcctcccaaagtgctgggattataggcgtgagccaccgctcccagccatttgtttgtttttgagacagggtctcactctgtcgcccaggctggagtgcagtggtgcgttcatggcttactgcagctccacttcgtgggcccaagcagtcctcccacctcagcctctcaagtagctgagactacaggcgtgtaccatcatgcctggctaattgtgtgtgttttggtagcgacagagttttgccatgtcgccaaggctggtctcgaattcctgggctcaagggatcctcctgccttggcctgccaaagcactggaattacaggtgtgagccactgtgcccagcccattctagtattttaacagttttattgctatatgatggacataataaactgtacatatttaaagggtacaatttgataaattttggcataagtatatacccatgaaaccatcatcttatatttttataacttttataaactgttctaaggtgatgatacattacagggttttagttttttatttatttatttatttctgagacagagtctagctctgttgcccaggctggagtgcagtgatgcaatctcggctcactgcaacctccgagtcccaggttcaagcaattctcctgcctcagcctcacaagtagctgggattacaggcacctgccaccacacccggctaatttttgtatttttagtagagacagtttcaccatgttggccaggctggtctcggactcgtgacctcaggtgatccactcacttcagccttccaaagtgctgggattacaggcgtgaaccaccgtgcccgggccggccttgttttaggtttttacatttaagaaaggggaaaaaaaaagcgtatcagccattgaacttgctgaactgagagggaaagggatttgtgcccacttctggaagggtgggctgtggcaggctggagcaggcaggcaggcctttctggaaacttgagaaggcaggagccggaatgggctttggatgccttgtgctggggccagcttctcaacagcctgggcccctacctggggctcacgggcaggggaggtgggaggaggcccggggctacagcatccagactcttccttgctctcccacaggaggcctgtgcaacctgtgcccagacagggccaacaaggagcacatcctgcacgcaggaggtgtcccactcatcatcaactgcctatccagccccaatgaggagacggtgctgtctgccatcaccacgctcatgcacctgagcccgccgggccgcagctttctcccagagctgaccgccacgcccgtggtgcagtgcatgcttcgcttctccctctcggccagcgccaggctccggaacctggcacagatcttcctggaggacttctgctccccccgccaggtggccgaggcccgcagccggcaggcgcactctgccctgggtatcccactgccgaggagcgtggccccacggcagcgctgatccatggagactgcgagaccgtggcacccctactgctggagaccacagtcctgatgtggacgcagggaacggggagcacatactgccccattggtgccttttcagccatctgaaaggcgggttctttcagcaggacaggcatttacactgatgaaacgccactgggagtgaggaagccagactccagagacacggagaagatcaaactggagctgcgttcataggctggcactctcaatcctacatcaggtgccaccaccaccagactcaggccctggtgtaagaagcggccaagtgcctggacccagaggctttgcaggacagtgttctcaggagctgggcctgaggcttaggagagctgccttcgctgcaggaaatcagggattatcccttaacagaagtgtctggagtagttttcaggtataggaatgagatgcctcgtggtgaaaggatctcaccctgggaagatgtggtgccccctccagggctctggaggatggatgcctcccccaggggctctccaagctgggcatttgggcctggtggatgccaacctggataacctgtggcccagcattgactgtccacccagccttgctgttaggcaccatgactccaagatgaagatgtggtccctgcccttgagtgacagcccagggacttaatgtggccatcgggcatcaagcacaaggccatgcaggtgatgatacgtcggaatagaggcaccagccctggtaactgcatcttctccccttgccaccccatggccccggctgaaagcttcggccctcctctgctgtcactcaatgatggggagccctaccccagaagtgtatcccacgagggcatcagggacgcagtgagtgttgctcaagggagtcaggaagagacggcaacgtaaaggatgtggctccatgtccatggtgccccctggtcaacataaggagcgtgggatccgatggaaaggtggagctcagggaaaatgggggtccttgcctctcgtgtaccccctcaaggctgaccccttagatggcccaggaatggcaggtgctacaaaaatggtacccacgtgggcatggaaatggggcagattaggggaccactggactcagaggggagggaagggctcatcagcacccgctcagggagcctgtccctttatgttcccaaataaagggtcctagaagactagaaagccaaggtcttttattaaaggtcccgactggttttcccactgtatttccatgccagccagggtccagggacagcctctcgggaggtaccgggtggctgggcctggggcccggtagcacagcgcttaacggtatctgcctgctccactccacggggccagaggcaccagcacgatgccgccccgactcggctctgcggtggcccctgtgggcctgcccttcctttagctccagctgctgcccgcggcatccccgctcattcccgctgcgcagctccgcgcttgctatctaagatctccctccagttgtcactccaggagagcagccgtctccttgtcgggggcaggaccaggtgccgattgtggcagcaggtgaacaagatgtgctcccagcttggggtctcctcctggcctaggacagtgaaagacagcgcgctgccatctgtcatgggtattattactccctctccctaatccgggcaggccagaggcctggaggctgccaaggataacgggtccaacctcgaactgtgtccttgtcatcaatgagcaggtcccccaagaccaccgtcttgtcccttgtcaggataattcgttctacgaactggggccccaggtgctgctccacccagcggtactgtgtagaaaacacagtctgtgagtagggcctgatggaagccggaattcagggatagggacttggctctaagcccttgagagccccccacccccaccttctgggtttctggtggtttctttttaaaatcaggatttaggcagctccacgtgcggagtaggggcggggcagccacaccttctcacccacacagtggtggtacttcagcagggggctggtgcagatgaagacctgcgtgctgcggagaaggacgcggttaccgccgggagccaggagcccgcccaggactccgcccgcccccctctctccttactccggtaggtcgttcatctcccgcacagcgtccaaggctcccgggatgggctccaggtccaggaaaaagcccggggcttcgtacacactggccactttatcctgaaagacaagagttctgggtcccggcttcccgttcccgcgaggacccgcagggaggctcctgggggctccgggcccgagctcagaggggcggagggggcgtcggtcaggggcacgcgcccaaaggctcctccccagggtgcgctgcccgcgggttccagggtgagagctctgcgcccttcacagagaagggggagacccccggaacggagcgagcgggccctgcccgggtggggaccctgcgccccctaccgccaggtcgggccgcagggcgcggtactgctcgcgggccaggaagccgcggcgttgctccagcggcacgtgcggctcctcagggaagcggcggcggaagccccgcaggaggccggcctcgaagtcggccaggacgccgtccatgtccaccagcacgcgcacgctccgcgccatcgccgccgggccggagctgcgagctctcggggtctggggggcgcgggctcggccggaagcggagggagcgctgcttccggagtccgccgggctgatttgcatagagtgtccgggccgccccgcccaggtcgtaaaccagtgccgacggccctgcggttgcgcgaggccatcctagggttcgggtgcagggacggctttggggggcacttttctgaccctgcgcttcttcgggacccagcctttgtccccatcagccgcctcccactttacggcagacgtacccccgttcaccccacgttactagtaggggaccgaccttccgggggcccaacaaagggatgctctgaaatactgggaagcatctaacgaggagtcaagggtcctaaacccgtggggctagctccacattttttttctttttttctttttttttttttttattttgagacggagtctggctctgtcgcccaggctgcggcgcagtggcggcgcgatctcggctcactgcagcctccgcttcccgggttcaaccgattctcttgcttcagcctcccgagtagctgggattacaggcacccgccaccacgcctggctaatttttgtagttttagtagagacggggtttcgccatgttggtcaggctggtttcaaactcctgacctcaagtgatctgcctgccttggcctcccaaagtgttgggattataggcttgagccaccgcacctggccaaagtcttattaccgcagtaccgtggtctcagtggattgctttcgtctgtgcagtggagcaggaacaatccctcgaggactacaaagtgaaatgaatctgttaactggtttgtgtaagtctagctcgttaagagactaattcacactagagttggcttgaaacatgggagcttcaagtgtggtttcccccggaaagatgattttgatcaagcacaggtaatcaggactgtcctcaggactttatgtggaactgacatcgcttacctactcccgtctagaaaatgctgaacagggccaggtgcggtggctcacgcctataatcccagcactttgggaggccgtggcgggcggatcatctgaggtcgggagttcaagaccagcctgaccaacatggagaaatcctgtcgctactaaaaatacaaaattagcgtggtggcacatgcttgtaatcccagctacccgggaggctgaggcaggagaatctcttgaatccaggaggcagaggttgcggtgagccgagatcatgccattgccctccagcctgggcagcaagaacaaaactccttctcaaaaaaaaaaaaaaaaaaaaagaacatgctgaactgtgatacattttgttgactcttctttttgtggatgtcatgaaacttcctgactccactcaaatctatttgcctacaaactataaagccaggcgccgtggctcaggctggtaatcccagcactttgggaggcccaggtgggagacagcttgagcccaggagttcaagaccagcctgagcaacacagggagaccctgtctctacaataaacaaatcaataagctgggtatggtggcgcatgcctgtggtcctagctactcatgagccttaggtgggaggaacccttgagcccaggaaattgaggctacacagccttcatcctgccactgcactccagcctgggtgacagagggagtccctgttgggggaggggagagccaaaattataaacacagatttaagtggcccatctcgccattgttccccat[133 bp omitted]cggtgaaaccctgtctctactaaaaatacaaaaaaaaaaaaaaaattagctgggcatggtggcgggtgactgtagtcccagctactcaggaggctgaggtaggagaatggcatgaacccgggaggcagagattacagtgagccaagaccacgccactgcactccagcctgggccacagcgagactccgtctcaaacaaacaaacaaacaaaacatgtaatagaagcatcacacacacaaaaaaacctgacagggccgggtgcagtggctcacgcctgtaatcccagcattttgggaggccgaggcaggtggatcacaaagtcaggagttcgagaccagcctgaccaacatggtgaaaccccatctctactaaaaatacaaaaactagccgggcatggtgggacatgcctacaaatcccagctactcaggaggccaaggcaggagaattgcttgaacccgggagacagacgttgcagtgagccaagatcatgccactgcagtccagcctgggtgacagagccagactccatctcagaaaaaaaaaaagcctgacaaaccagtctaagaggggctcaagtcaacatgcatatgactcatagatacgcagacattttggaggcccagacttgcgagttatctcaaggggaagcagtcttgggggctgagccctcaacttgtggaatcaaagctatctccaggtaactgattgtcagaattgaattggagggccaggtgaggtggctcatgcctataatcccagcactttgggaagtcgaggtgggcagattacttgaggtcaggagttcgacaccagcctgggcaacatggcataaaccctgtctctactaaaaatacaaaaattagctgggtgtggtggcacatgcctgtagtcccagctactcgggagggtgaggcaggagaatcgctggaacccagaaggcagaggttgcagtgagcagattgtgccactgcacttcagcctgggcgacagactgagacactgtcttaaaaaaaaaaaaaaattggaggacacctagctggtatccactgcagaattgcttgcttgcttgcttgctggtggggagaaatccccgcatatttaaagttggagaactttttttgagacagggtcttgctgtcacccaggctggagtacagtggtgcgatcatggctcactgcagccttgatctcacagggtgaagcaatcctcctgcctcagcctcccgactacaggcgtgtgccatcacacctggctatttttggtagagacgaggtttcaccatgttgcccagtcttggagaacactttaaaatgttactgcccagaacaaaggggaggtagaagagtctaacctgctcatctttagagccttcttcagaaagaaacccactcctctctgggtcttcatctgttttaagattttgttttttaaggaggtctcgctatgttgcccaggatagtctcaaactcctgggctcaagcatcctcttgccttggcttcccaagtagctaattacaggcacatctggctatttaacttcaaatgactcctccaatcagtaggcaggatttatagtgacaaagagaaaagcatctaaccagggagaacactgaaaccatctcaaaaagaagacacagtacacagtgtttcaaaatgtggatattgtttacttgaagcaacagtccaggattgtgaagtacaacacattttaaggatgagactttcctttcatggtcaagcaccagcatcatgcacacagcatcaggttatttaaaacaacacgcctgtgggaccccgttcctggaggaagacccgcttcagtgtgattgcctcccttgcttcactgcttttagttccaggcagtttcattgtacatccaagccttcctctgcgtgagagcaaaggctttgctcatcagccagccagtcttgttactatctggctactttttaaggttaaaaaataaaaggcagtttctttgctttgcaggcggcaaggcaggaggcgcaggcctcttcattgttcacatgtcacaggaggaggctctgagcaaaggccactggcaagttagggcaacaccaagaaggctctgcggagagactccctgtgggttggggcctggcaggaacggtgcctgtggactgtttatggtctgtccagttgaggcttggtaaacccaagtaaagtgttaaaaacctcagtacaaaagatcctctaacacatctggaaccaaattatttcttcttaaaaacacagtactaagtgtcacaaagctttccctccaatctactactagaaaacactcatgccatggcccacagacccaagagtcaaggacagagagaaacctgttcttcaaaagaaaaaaaaaaaagacagcagtacataaagtgcttctttttaatgaaacaaatccaagagatgtacagtcaggctcaagttgtgcagttcacaagcatggaggaaacagacagaacgacagcgttcaggacagtcagagctaacccaagacgaggctggacttgccgccagggggatttcttctggatggcactggggccggggccaccgggctgggcacaggcgcagcaggcacgggcttctcttcactctgccccaggctgcctggcaagtctgtgtccacattttctatgaaaacagggaatagaaataatactcataatgacagccatttcctgttaagatcaaggatctgtttctctttttcttttttttttggtttgatggttggaaacatacctaaaagcataaacaaaataatcacccaccatgctcccactccacagaattaaccattgttcatcttttcccatatttgttgtttatgttcttttctaaattacacaaatatataaggacatgaagtttttttttgttttgttttgttttttgacggagtctcgctgttgcccaggctggagtgcaatggtgcagtcttggctcactgcaacctccacttcccaggttcaagcaattctcctgcctcagcctctctagtagctgggattacaggcgcctgccgccatgcccggctaattcttgtatttttagtacagatggggtt[145 bp omitted]tctacggccccttccagctccgggtggatcctgctccccctattcccagaggtcccactgcaagtcctgtgcagccttctagtccacttgttttatgtatatttacatgtagccagataacatgtaacatgttttggttatatttaacataaatggtatcaacttctttttttcactcttggaaatgtatccatatttacaaacagggtagtaattcgccttgcttattaactgtatgttttcaaatccctcacctcactgtcaagcttcattgctttatagtaattatcacatgatataggctatttatccaattctctgacagcaaaaaaactggaacccatccaattttccaaatgaattgtctctcattagggttgtttctaaaccgggaaaaaactgattcaaagtgcaaagtgaatgcaaaaattctatattttctatgaaaggaaacttttactaagagcttaatagtatacatatttttagtttttttgtttgtttgttttttgtggaggggtggggtggcaggtggaggatattgagacagggtctcactctgtggcccaggctggagtgcagtacctcaatcacagcccactgtagcctcaaactcctgggctcaagcaatcctcctatatcagtctcccaaatagctgggactacaggcgcgcaccaccacaactggctatttttgttttttttttttttttatttttaaaagatggggtctccttatgttacccaggctggtctcaaattcctggactcaagtgatcctcccatctcaccctccctaagtgctg[132 bp omitted]cccgagtagctggaattacaggcatgcaccaccatgcctgattaatttttgtatttttagtagagacggggtttcgccatgttggccaggctggtctcaaactcctggcctcaagtgagccacctaccttggcctcccaaagtgctgggattacaggcattaagccactgcacccggcctagttttccttttttttctttagttgagatggagtttcacacatgttgtccaggctagagtgcaacagtgcaatttcggctcactgcaacctgtgcctcccgggttcaagcaattctcctgcctcagcatcccaagtaagtagctgggattataggtgcccgctacaacgcccgactaattttttgtatttttagtagagacagggtttcaccatgttggcctggctggtcttaaactcctgacctcaggtgatccaacctgccttggcctcccaaggtgctgggattacaggcgtgagcctccatactgggccttagttttctttttaatagcaagtttatttcagtgttaaccaatcaaattcagttgcatattctaagatattcgtaaaaatatttcatagaatcccttttgcctgaaaaggcagtaagggcagttaataatgctcctatattaatggattttttttttttttttgagactgtgtctcattccatcgcccagactggagtaaagtagcgtgatcctggcccaccacaacctccgcctcccaggctcaagcgattctcctgcctcagcctcccaatagctggggttataggcgcccgccaccatgcccagctaattttttgtatttttgtagagaccaggtttcaccatgttggccaggcttgtctcaacctcctgaccgcaagtgatccacccacctcagctgcccaaagtactcagattacaggcgtgagccaccatgcccggccaagaagaggtctttaacacttactctcaattcatgtacttatctcatgataggctagaagcaaacaaacctccctcttctgtggctgcagtatttctcattggacagacatttattttatttatttatttttcatgctttgttaatgttaacatactactgctgcttttaacatttcatgaatttctggaacattctatgggagtaacataaaatgttctatactatttaactacaagcaaaaatagagtatgaagcttttcagaatgacaactgtcacaattatgaactaaaactcagagagggtcacccattagtttccttggttacatccattgtaaaagaagcaagatcaaatgcactggatcagacacacaagtcctacaataagtgtccctgaaataacctaaatataattgtaaatataaaagaaaaacaaaactccacatttaaaatattcaagataaagagaattcggactgagacaacttgttagttcaagcagtttcatttctgctggtgggacatggcctcctgctatacatacaggatctactgaagtcttcattctctctctgaatccagcagttaatgaacattctgaagaacaaaaaattatcttgcagtcctgccatagtggtttattttcataaaatcctcttcagatgaatcaagctcaatactactaatcttatatttgtcttacattattactagaactgttttgtttttcacaaatacataacatactaataaagaagaagaaaaaaataaaaaagcacctatggagactaaacaagcagcagtaggccttactttaaatgtctgtccaggccaggtgcagtggctcacacctgtaatcccagcactttgggaggccaaggcagctgaataacctgaggtcaggagtttgagaccagcttggccaacatggtgaaaccccgtgtctacaaaagtacaaaaattagctgggcgtgtgtgcgcgcctgtattcacagatactcgggaggctgaggcaagagaatcacttgaacccgggaggcggagtttgaagtgagccaagatcgtgccacagcactccagcctgggcgacagagtaagactccgtctcaaaaataaataaatgtctgtccagtcagaagtactccacccacagaggagggaggtttgtttgtttccagcccataatgagataagtacaggaattgagagtaagtgttcagaaactttgatttattttttcagatggagtctctctctcttgccaggctggagtgcagtggcgcaatctatctccacctcccaggttcaagcgattctcctgcctcagcctcccaagtagctgggattacaggcgcgtgccaccacgcctggctaatttttgtatttttagtagagacgggctttcaccatgttggccaggatggtcttgatctcttgacctcatgatccgcacacctcagcctcccgaagggctgggattacaggcatgagccaccgcgcccagccaaatgtttagaaacttttatgccaatttgacacagaaagcttttgtctgctgaagataatttaaaaaaaaaaagggctttaaatgaaattatttctaccaaaatatacattttagacactcctggtctcttttctttggcacatcaataagataactgaacaaagacatctctatctgaatagaaaatgattcattgtaagcatcaaagaatcagaactggaagaaatgtagccgaccatctaacttgcccgcagtcagggagacttctctgcctgaacttcctggaccttctccctcttagatttctcaagatggaaactccaaagtcattcctgtagccattcctgcgtttaattgcccaagaggtaaaataaatttcccgtatatccaaagggaatctatcttatttaaactgaattggggttgacctttaatcctccagatgtatcttattactgtacctcagccaggcacagcggctcacacctgtaatcccagaattttgggaggccaaggcaggaagatcaacatgaacccaggaccagccgggggaaacatagcaaaaccctgtctctacagaaactacaaaaattggccaagcacggtggctcacgcctgtaatcccgacactttgggaggccaaggcaggtggatcacgaggtaaggagttcgagaccggcctgggcaagatggtgaaatcctgtctctactgaaaacacaaaaattagctggacacagtggcgggcacctgtaatcccagctactcgggaggctgaggcaggagaattgcttgaatcaaagaggtggaggctgcagtgagccaagatcatgccactgcatttctagcctgggcaacagagcaagactccatctcaaaaacaaaacaaaaacaaaaccacaaaaattagccaggcatggtggcatgcaactgtagtcccaactactcaggaagctgaggtgagaggatggcttgaacccggaagtcaaggctgcagtgagtggtgattgtgccactgcactcgtggttcaggcaacagtgagaacctgtctcagtaaagaaaaaaatattattgtgccccttttcattttaagacagatgaactaaagttgcagcagtcagccacacagaatatatcagatcagaaacttaaaaaggccgggcacaatagcttacacctgtaatcccagcactttgggaggccaaggcagggggatcacctgaggtcaggagtttgagaccagcctggccaacatggtgaaatactgtctctactaaaaatacaaaaattagctaggcatggtggtgcatgcctgtagtcccagctactcgggaggctgaggcaggagaatcacttgaacccgggaggcggaggttgcagtgagccgagattatgccactgcactccagcctggcgacagagtgagactctcaaaaaaaacaaaaaggaaaaaacaacaacaggtaaccagataaccactggggggaaaaagaaaggacttaggagtttgcgaccagcctggccaacatggcgaaaactccgtgtctgctaaaaataaaaaaaattagttgagcgaggctgggcgcagtggctcatgcctcccagcgctttgggaggccaaggtgggtagatcgcttgaggtcaggagttcgagaccagcctggtgaatatggtgaaactccgtctctactaaaagtaaaaaaaatagccagctgtagtggcgcacacctgtagtcccagatactcaggaggctaaggcgggagaatcgcttgaacctgggaggcggaggttgccttgagctgagatcataccactgcactccagcctgggtgacagagcaaggctctgtctcgaaaaaacaaaaactgtgaaggggactgaaaagggaacagaattattaattatgtggtaggactattgacacattgttgacatacttctccaagttcccctaacttctagttgtattaactgaccaaaataattgaataaagattagctgattcttgttaaataaggtctgacagtgaaagtattcagaatatagaaagcagtagaaccggccgggcctggtggctcacgcctgtaatcctagcattttgggaggccaaggcaggtggatcacctgaggtcaggagttcaagaccagtctggccaacatgttgaaactctgtctctactaataaaaaaaaaattagccgggcgtggtggcagcccttgtaatcccagctacgcagggaggctgaggcaggagaatcacttgaaaccggtaggtggagttgcagtgagccgtgatcgtgccactacactccagcctggacaacaagagctaaactccgtcaaggggggaggggaggggagagggagggagagggagggagggaggggaagggggagagaggaggggagggaggggagggaggggagggggggatggagggaagggggaggaagggaacgggaagggatgagaagggaggggaggggaagggagaggagggaagaaggaaggaagcaagaagtggaatcaaaaaacctagattttacctccagaagtctttccagaacagtacaaatagaacacaaacagtaattaatacatacatcttcggtccaatgcaaaagtaactggtcctgtgatattatgatatacatacgtatatgaaaatacacacacacacacacaaaatctgtttttgtccacagctactggctggtaactcccatagcccttaaaagtcttttgaatggggtgcattaagcctcaggagcagccctcaggaaacagaatctctttgtgacctcctgtcctccttttacctgcccagggcaggactgtaatctgatggcaggtcaaaagacccttaatccagagggtcctgctccataccctggaggagggaatgctacatggagaggccaagaagaatctaacagacgggccttctgagttcccttgttcagtccattggtatgaaatcaaaccttttttgtctaatcgtatttctgtacagttgtcaatcatgcttatgtaatgaagcctccataaaaaaccaaaaggggccaggtgtagcggctcatgcctgtaatcccagcactttggaaagccaaagcaggtggattactggaggtcaggagttcagtatcagcccggccaacatggtgaaacctcgtctctactaaaaatacaaaattagccaggtatagtagcgtgcacctgtaatctcagctactcaggaggctgaggcaggagaattgcttgaacccaggaggcagaggttgcagtgagccaagatcatgccattgcactccagcctgggcaaaaagtgtgaaacttggccaggcatggtggcttacacccataatcttagcactttgggaggctgaggagggtggatcacctgaggtcaggagatcaagaccagcctggccaacatggcgaaaccctgtctccactaaaaattaaaaaattacctgggcatggtggtgcatgcctgtaatctcagctactcaggaggctgaggaaggagaatcgcttgaacctgggaggcagaggatgcagtgagctgagatggcaccactgcactccagcctgggtgacagagagtgagactccatctcagaaaaaaaaaagagcgaatctccatctcgagaaaaaaaagaaaaacccaaaaggggctgggcacagtggctcactttgggaggcaaaggtaggaagactgcttgagtccaggaggttgaggctatagtgagcaatgagattgtgccactgcactctagcctggttaagaccaaaacccagtcttaaaaaaacacccagaaggatggattctgaggacttctggataactgaacatgtggaagctgacaggaaggtgcaacaactcatccatgtgccaggagggtggcacaccccaactccaaggtacaggagctcctgtacttgggacctttccataccaggccccaagtatctcctcactgggctgtttatttgtatcctttcaaatatccttcgtaacaacccaggtacagtggctcatgcctgtaatctcaatacttttggaggctgaggtgggaggatcacatgactggcctgtgtaacataacatagtgagaccacatctctacaaaaaaagaaaaaaaattagccaggcatggtggcatacacctgtatcccagctactcaggaggctgaggcaggaggattgcttcagctcaggagtttgaagttgcagtgagctgtgagggtgacactgcactccagtctggacaacagagcaagattcagtttagaaaaaaataaaaaaaaatgtatcatatattcataatgaacctgtaaacataagtgtttccctgagttctttctgtgaacctctctagcaaattaatcaaaaccatagaaggggtcacaggaaccccaatttgaagccagtcggtcagaagttccagaggcccagacttacaactggtgggaaggaaggggcagtcttgtgggactgaccctcaacctgctgaatctgaggttatcttcaggcagagggtgtggaaactggattggaggactcccaactggtgtccactgattggcgtgtggggagaaaccccccatatttggtcacaggtgtcgtcttctgtgttgatgattgttgtggtgtgaaaaaaagaggaaaaacacgtttgagtgttttccccctaaacaggtcctataaggaagaacccaggcaatgctcccaaaggctcaggagcttctcctctaagcccaccaagaaacactgtgaggccgggcgcagtggctcatgccgggcatggtgccgcgtgcctgtaatcccagctattcaggaggctgagccaggagaagtgcttgaacccgggaggcagaggttgaagtgagctgagatcctgccactgcactccagcctggatgacagagccagactccatctcaaaaaaaaaaaaaaaaaaaaaacacaaccaaaaaaacagaacactgtgtgagaaggcaggagaggaatctgcttcttcaacctttccgtgtgtccttgtaagcacaccacaaaacataagggtaggaaaaggccttaagaggaagctgctgcttctgtctagaccagagggccttgtgactgctgcacttcactgactgctactgcctgacacttacaaaccttgcactcatcggcaagtctttagcacttgttacagaaatgccaataaatacctccaagatttaagataattaagtcaatgattacagctcatttccacctataattcgtaatatggttggttagctgaaaatttacatctgccccctaaatcatcatttacaaaatcaccaagcaggtaaccaatgtcttgctgaataagcatctccctataaaaacaaatgaactttgtaaagtggatgctgtgagctgagcttgaaatggttatattaaaaagctctctctggctggtagtgagttatcttgttcatagttacagatcaacctccttgttttactctttcccctcttctcaatactgcacttggctagtctgtgataaatagctacataaatacaaaaagctctcagctgggtgctggggctcttgccagtaatagcagcacttggggaggctgaggtgggaggatcacttaagctcaggggttcgagaccagcctgggcaacatagtgagacctcatctctactaaaaataaaaacaaattagcgaggtgtggtgttgtacccctgtagtcccagttactagggaggctgaggtgggaggatcacctaagcccaaggaggttgaggccacagtaagctgtgattgcctactgcactccagccttggcaacagagagacacctggtctcaaaaaaaaaagctctcattaagtgtaacaaatactgacctgattaatatgtatgtgtgtgtgtttagatatattttggtttagtttatttttttcaggcaaggtctcactctgtcacccagactggagtataacggtgtgatctctgctcactgcaacctccacgtcctgagctcaagcaatcctcccacctgagcctcccgagtagctggactacaggcatgtgccgccatgctaggctaatttttgtacttttttatagagacagggtttcaccatgtttccaggctggtcttgaactcctgggctcaagcaatctgcctgcctcagcctcccaaagtgttgagattacaggcgtgagccaccatgcccagccaatatatgtaattttaaaggattctctgttttttcccttctattatgtttctagcattgatcgcgttactggcagattagagtatggcggcacttggggcatggccaggtttcactccccagtctctttccccaagacatgatttaaatcaagattcagatctgtcctaaaaccatggacagagccagaaatttggtcttcagaagtacttaccatgaatatcaccttctccctagaaaagaaaaaaattcaaaaatttacttcctattttaattttggaacacgcaaaacagtcatagttcatagcagctaacatctacttgaaaccgaatgtgacatttcattgtgttgcaatcaagcacagggtcagtctgctacctctatccaactcaggacaatgctatgcaaaaattctgcatgataaattgctctagtgctagtaccacgtctacaacaaaccccaacatttcctctgaggacctaacaccaattagcacttcagagatcttttattagaatggaaaactggtaaatctctcctttcatttctctctcctttccccgataaggggaaactagataatagttatggaaggacccctatcagttccaaagcccttctccagttctctccccactcagacaggtgatgcctcactgtgctctgagggctttagtgcttagtcgggcggggtctttccacttcgcagcacaccccctggggggcttggtggcagtattcaactgcagacacaaccaatggtaatgccagcactagtctcctggagttcaacgcaaagcagttctgaactcagaaatgcttctatatatgagacacacaggaagtgagaaagatccacaagttccaaaaatcaataggggagataaaacaaatcctaatggtaaaagagatacagaaacagactgagaccatgttaacacacttctatgattttactatcaatcttccattatcaatatggcccagtccctttcctaactacctcaatgtaaaattccagtgggtgaactgaaactcttagtacaaatttcagaatcatattgacctgaaagcctttctggcctcatgctgtcacactgaccttcagatctaagaagtctccggagcttgcttcagaggagttccttctctgcagtccagatgactccaagtcttccctgccaccactagacttggcacctaaaaatcaaaatatactttcttcagaaatacaatagaaaaaacctaaagcaaaacacttcaggctgggcacggtggctcatgcctgtaatctcagtgctttaggaggccgaggcgggcagatcacctgaggtcaggagttcaagaccagcctggccaacatggtaaaaccctgtctctactaaaaatataaaaattggctggacgtcatggtgcatgcttgtaatcctagctactcgggaggctgaggcagaagaatcacttgaactcgggaggtggaggttgtggtgtgccaagatggcaccactgcactctgtactccagcctgggcaacagaatgagactcttatctcaaaaacaaaaacaaaaaacttcagcaattgacgttatgtgttagtctcacattatgaaatgaggaaacagtcttaaggaagttaagctgatcacttaaacattaacccagtctgacttcagtccttactctgatccatcacacagcctctcagtatttcccatttctttcctctcaggctaagtctaaactgttgtaagctagattttgttattagttcaaaaccagctgtagttggtttttcttttgtttgtttttgacacagggtttcactctgtcacctaggctggagggcagtggctcaatcacagctcactgcagcctccacctcccaggctcagcaatcctcccacctcggcctccggagtatcagggactaaatgcacactgccactaccaccagctaatttttgttttgttttgttttttagacacgggggcacatgctggtgcccaagctgcatctgtggctgttgatgctgggcccatccctttgaacagtgagcacagataacaagagtacctgctgacttggcccaagaagcttgattttcttcaggtgtcccaaagatattagaggccattttgttcttcctcacaggttgttctgttggttcatcaaaacctaatgaaaaattggatccaccacctggaggccgcaaaactctgcaaataatggcaaaacatcaacttcagatcatactgaaacatttcttggcataaatcttttcagacaactttcatttcactttcctcacccattcatctccctcacccctacaacagatagctgctaacaggaaaaaagaatcaactccatcagtgtctacattcagtgctggatgttaagatactaaatactgctttataatacttgtaataaggtcatcgatcacacaaggcagctgaaacagcatggaactcatcataaataacagcctggttggtgtccccttttcagaaatggcaaaagatctaatggaccttactctactgggcttggctgaatatactttcaaagaagtttagaagtatttcttgttattattcatttaaaaatcatttccaggcacagtggcacacacctgtaatcccagcaccctaggaggccaaggcaggatcatcacttgagcctaggagttcaagaccagcctgggcaacatggcaagaccccgtgtctctataaaaaaaaaattaaaaattagccaagcgtagtggcgcatgcctgtggtcccagctacactggactctgagacagaaggatcgtttcggccgggaggtcaaggctgcagtgagctgtgttcacaccgctgaactccagcctgtgtgacagagcaagactct[269 bp omitted]ggcctcccaaagtgctaggattacaggcatgagccaccacgcccagccaaaaaaagtaaataaattttaaaaaatcacttccttcttattttcaactagataaataacttgggcacgatcagtagcaggcccctatagtcccagccattctggaagctgaggcaggaggattgcttgagcccaggagttcaaggccagcctaggcaacatagtgagatccccatctctaatcacttacacacttacacacacacacacacacacacttaagtcagcttgaccaatttagaagcccaagaagagctgataatagtctcttctatctcaacctcactaaaaagccatttacatacttgtacctcactattctcacaataaacataagtaactacccatgagggcaaagtcagtatgagcaattaagtataagattccatgacatggtctatatcagtgttcctttgaatatcatctgtagctttctgttcaacatggtaatatattttttaacatttccaaatctttctgccataggttgaccaatttgtctcctccttggaaaaactcaatttaactcctcttgccacctctcaaaacagaaaatgcaggtggttttatagaaatacttttttttcttttcttttttttttttgaggcacaatctcgctcttgtcgcccaggctagagtgcagtggtgcaatctcggctcactgcaacctccgcctcccgggttcaagcgattctcctgcctcagcccctgagtagctgggattacaggtgcccaccaccacaaacagctaatttttgtattttcagtagagacggggtttcgcca[137 bp omitted]ttggtcaggctggtcttgaactcctgacctcaggtgatccgcctgcctcagcctcccaaagtgctgggattacaggcatgagctacccagcccagccaactttttttttaacttcttttttttgttttcttactgcctgtgtaattgcagaatatggaaagactttctaactactgattcaattcctttactggtgatatgagtggt[132 bp omitted]tgcaagctccgcctcccaggtttacacctttctcctgccttagcctctcgagaagctgggactacaggcgcccgccggaacgcccggctaactcttttatttttagtagagacggg[148 bp omitted]gtggtgatgtgaacctgtaatcccagctactccggaggctgaggtaggagaatcgcttgaaccctgtaggaggcggagcctacagtaagctaagatcacaccactgcactctagcctgggcaaaagagtgagactccgtctcaaaataataatgataataataataataataataaaattaaggtcaggagcggtggctcatgcctgtaatcctagcactttgagaagccaaggcaggcagatcacaaggtcaagagatcaagaccatcctggccaacatggtgaaactgtctgtactacaaatgtacaaaaattagctgggcgtggtggcacatgcctgtagtcccgactattcaggaggctgaggcagaggcagaagaatcgcttgaacccgggaggcagaggttgcagtgagccagagatcatgccactgcactccagcctggcaacacagt[145 bp omitted]aacccgtctctactaaaaatataaaattagccaggcgttttggcacatgcctgtaatctcggctagtcgggaggctgaggcaggagaatcgcttgaacctggaaagcagaggttgcggtgagcagagattgtgccactgcactccagctcgggcaaaaagagcaaaactgcgtctcaaaaaaaaaaaaaaaatcaagaaaaagacactagtacccgaacaccagcttaagagcaagtcaaaactctaaccagtcccactttttaaaggtctctgttcctcctgcaatagcaggtagtaaccaactcggatgacgtcagtgttgtagagaccatttgtaatagtgagatatccccaaacaaaggatgtagatcataaggcagaaagtatctcaatgttttaggatcctactattctttcagaatcatacacgacaactaaatcaggattatatatttaagactgaacaaaaatgtgtccatgtactgtaaatagcaatttttaaaaaattgctccttttctttcttctctcttaaaatcctgaagtttctgtatatctttgcagatcattccctaccagactaaatttataacgagtttatggggccaggagaacattactggacaaaattaagtttatgagaattaggtgagaatatagaaaaagggaaggtagagagacaataaaatgacaatgctactacagtccctagagcataatattggagggaaattgatgacgaaaggtgaattaaacattcatttcacaggatcagaactcatttgtctcacatttcaaatgtacacatgaaaaactaagtgtgaggattcatttgacctaattactgaaattctttacaaaacactaatatcaactcaaccccaaagaataaaaccccagattacacattatcattccgacgactgaagtctaaccggcagaaagttggcctcgtaacacaaaatgaaaaaccaaggctcaatctcttcctgttctctgaagaaatcatctcattggaaagaaaacagaaagggagcgaccagtttcctaggtctgtgctacttaagtaccccatcctcccagtaatcaccaatttatttttttaatcttacctagtctttttgaccttgtaaacctgaaagtattgagttgtaaaggaatgtcatttcccatgctttcctcctaaggctcaattgctgagtgaggcgtgctttttgttcccaagttctctaacccctgtgagatatggctatttcacgtgtcttcttagccccacaaaatggctccctttgtgccacttggccaggaccccgagggtagccacacatgaatgcaggtcataatcgatgtaaaatacatgctcaaaaaagtgatttaagcttcttccaagccttgaagaggatcccagacataactgtaacccaccttaaagaacagtgtgcaattagctgagacaatgtggacaccttccacagaatccaaacccttccaccaagtaagttaagcaaggacttggaaaagggttcctgtccaaacactgtacccagtgccccaagcccaaaaagcagtgggaagaagggcaagaaaaatcccccgcttcccaggtagcgctaccacgttagagacaatggatgtctccggccccgcccaagaacaagaaacctcctcctgcaagggaaccagggccagggatgaactcactgggcaaacgtcaaaggaggaagcgaaggtaggatgcaaaggccacggtccgaaggtttaagcgcagaaaacccactcgggttggctcgttccccgcgcccgcccccgccccccgccttagaaatgagcgcagggatggggagaaggggtctttcctttgttaggaaggggagacacttggaagaggggaggcacttcgaagaggggaagaacgattgggtcctcaatggggggtgaagggtcgcgatgaccagccccgctcgaccacacatgcacctgtcaggtaggtccgaataaggagtgggggcacggcgagggtaaggagcccgccggacctgatcgatccggtctccggatccaatggctgcgcgcgagagcgagaccaaccgcatgccacgggggagagacaggagcgcgtggcccatcaatgggacaataggacctgaccatgcatggggccctaaaggatccccgggcacctggggggccaagcccaccaccctggggatgcaccagccgggatgcacacaggagaaagcgaagccctccccgaaggttccgattaacgaaaaccggccgtgctccgaggggcgaccagccccggcctcctcagcccctgactccgtggaaggaatgaatggagagcagcagggacccgggtggggccggcgcgcagggctcgccaggcggcacaaaggcggcgccgacggcagaaccccgccacccgccccggcgcgagcacagcgcacggggctcgttacccgcaacgaccggcgcgaggccccgccggcagcggccctcccagcccctcagccccgcgcggctcgggcgcgacccggtcgcctcaccgggagctattcctgctgttggggtcgactcccttgaaggtggtggttgtggtcatggcgccgaggagcgaggtaggctggcgccggagcagaacgctcaaagggtcggacccgaggggcgctgggaaactccacacccaacagccgaccaccgctgcaggagccgccgctgccgcctgtccggccgatcgacgcctttatagggttttcaacccccgccccctaacccgccggcattggccgattcaaatgaattctttcattcctattggctctctggagtgccaagcaccatgcggcattacgatgggctgtggcggccacggctcagcctaagcccgcccccttcctggactgggaaggccttgggactctctcccctcccccaccccaaaatctcggcgatgattggacggaaggcgaatctacctcgcgctgggtggaagtcgtgctggctgtcactgtaaaacgttacctgacagagggggaagctctttcttggggagttacaacctcggcaagcagaagggagatttgtcactgttactgttctctcatttgctttactgatggtgggatagtaagggcatcctccttaaaggatgaaaagtactgcaacaagttgacatttatctgttgaatacctactgtgtgtcccatttagaaacctaatagtctcaaagcagccgcacaatgagtcagcaacagagagcgcaccaagatgatcccttttaaaaggactggaaattccttacattttaatgttactgtttagttgtaatgggtggtgcatgtactggaccaaaattacagtcgctcctatttgggggcctattctaaggctggttaatgcctggcaccaggaatggactcattccctgctaccaagactatggaagcagctcaggcctctgcagctgtttataacccttaagtcatgactcttccacctgtctgggtaaatctatccatgcgacaaatgcagacacacttggaggattcaggaatgatggtttacaagatcataataggaaagccttgggcaaaagagggcaggcccttctcatgtcttgcatatttcctcaaggcagatgtctttgcttgtctcaatatttccataataattgaaccacattcctctttgcaaagccacctttcaggtagttggaagtttgtattctgggcagtctaggttaaccaccctccccccccgggctttcatgaaaagccagtgagaagttctgttctagaaagcacggatgatgcatttatgtgcttaccacaacagcacgaagcgcaccacttgtttgtgttagaatcttcccttctttttttcctttcttttttttttttgtttttgaagtggagtttcgctcttgtcacccaggctagagtgcaatggcgctcaatgcaacctccacctcccaggttcaagcgattctcctgcctcagcctccgtaatagctggaactacaggcgtgcgccaccacccctgactaatttttgtatttttagtagagacggcgtttcaccatattggccaggctggtctcaaactcctgacctcaggtgatccatgctccttggcctcccaaagtgctgggattacaggtgtaagccaccgcatctagccaaaatcttagctttttttttttttttttgagacagagtcttgctctgtcgcccaggctggagtgcagtggtggcgcgatctctgctcacttgcagcctccacctcccgggttcaagcgattctcctgcctcagcctcccgagtagctaggactacaggtgcgtgccatcatgcccggctaattttttgtagtttattagtagagatggagtttcaccatgttagccagcatggtctcaatctcctgacctcgtgatccacccaccttggcttcccaaagtgctgggattacaggtgtgaaccaccgc[144 bp omitted]ttctcctgcctcagcctcccaagtagctgggactacaggcgcccaccaccatgcctggctaatttttgtatttttagtagagatggggtttcaccgtgttagccaggatggtctagatctcctgacctcgtgatccgcccacctcggcctaccaaagtgctgggattacagcatgagccaccgcacc[138 bp omitted]tgcctcagcctcctgagtagctgggactacaggcgcctgccaccacg[138 bp omitted]cccggcccaatcttcccactcttaaaggctgagcctatatttccaaaatcttaaaagaaaaaaaaatcagaccaatctagccagtgagcacgccctcctcagaaaccatataattatcaactaggaggtagtggagtatagtggttgctagctcagactctcatgggataaatttggattggaatctcgacccttaccttttctaagcactagttttcacctttctgaaataaacacacaatagtacctgggggtctgtggagttttggggactaagtgacctcatggatgtaaacggcttggctcaatatacaagtcatcaaagtgatagtccattttattatcagacttatttagaaagcaatcacatacttgtatgttaaatgaggggtttggacttgactcgcatggtcttttggcttacattttcaggttgtacttatttccttgcagtctaatagaagatagcttggtgaggcaatgctacaatagactagaagtcaaaagacctaagttctggttttgccttttcccaatataagacactggtacatcatttat[138 bp omitted]tggggaaaccccatctctaccaaaaatataaaaattagctgggcgtggtgatacgcctgtaacccagctactcacaaggctgaggcaggagaatcgcttgaacccagaaggcagaggttgcagtaaaccaagatcgcgccattgcactccagcctggacaaaacgagtgaaactgcttctcaaaaaaacaaaaaagggattaatagcacttgtgttactggaaaggtgtcccagtccagaccccaagagaggtttcttggatattatgaagaagagttcagagcaagtccataaagtgaaagcaagtttattaagaaagtaaaaaacacgc[142 bp omitted]gtggtgggcgcctgtagtcccagctactcgggaggctgaggcaggagaatggcatgaccccgggaggcggagctggcagtgagccaagatttcgccactgcactctagcctgggtgacagagcagaaagtaaagaaacaaaagaatagttactccacaggtagagcagccaggaaggctgctggttgtccatttttatggtttttttttttttttttttttttgaaagagagtcttgctctgttgcccaggatggagtgcagtggcacaatctcagctcactgcaagctgtgcctcccaggttcacgccattctcctgcctcagcctcccgagtagctgggactacaggcacccgcaaccacgcccggctaatttttaggatgactctcattgccatcttggtattggtgagttttggccaacttctttactgaaaactcttttatcagcaaggtctttatgacctgtatcttgtgctgacttcctatctcatcctgtgacttagaatgcgtaatcgtctgggaatgcagcccattaggtctcggccttattttacccagaacttattcaagatggagttgctctggttcaaacgtctctgacacctgttctgagttgtgagggctggaatgagataaa[132 bp omitted]tactaaaaatacaaaaattagctgggcgtggtggcatgcccctgtagtcgcagctgctcaggaggctgaggcacaagaatcacttgaacctgggtggcgcaggttgcagtgagaccagatcatgccactgcattctagcctggtcgacagggcaagactccatctcaaaaaatccagaaaactttctattagaagtgccccatcctggctgcacatcagaatcacctatgagatttttgaagaatataaatgaatgccaggtctccacccaagatctactaaattgcagtttctggggtgagggtttagtcatggatatctttaaaatgttaaacaggtaattctcatttacagcttgagctgagaacctttgctacaaaggtaaggaatcagtcccaggagaacccttttaatctgatctgatttatgaatcagagcaaatgtatgtaaaacaaacaagtgagtaaggctgttggcctgtttagcatatttgtttaagttctcaaggtaaccaaaaaatcaaaggaaacagaagaaagattaatcctgatgacaaggaatggtctaacagcttcttcatgacctatagcagtgtttcttaaacttcattttttttttttaacagcgtcttgctctaaataacccaggttagagtgcagtggcacaatctcagctctctgcagcctccacttcctggactcaaggaatcctcccacatcagcctcctgagtagctgggcctacaggcacatgccaccacacctggctttttttgttgttgagacagaggcttgctatgttactcaggctgctctcaaactggctcgaaaggattttcccacctctgcctcccaatgtgctgagattacagacatgagtcactgtgcccagcctcttgaacttctatgaaagcaaaacccatatatataaaatagattaacagcaaagcagctgtgattacaactgggcagagggtcccagatcctggccctctctccctatgtcctttgtcacctttttcttgactgtcctcctaaaacaataccaggtttccttaagatttcattttaaaaccactgctggccaggcgcgtgtgggctcacacctgtaatcccaacactttgggaggctgaggcagatggatcacctgaggtcaggagtttgagaccagcctgaccaacatggagaaacactgtctctactaaaaatacaaaattacctgtgcgtggtggcacatgcctataatcccagctacttgggaggctgagacaggagaactgcttgaacccaggaggtggaggttgcagtgagccaagatcatgccattgcactctagcctggaaaacaagagcaaaatctctgtctcaaaaaaaaagaaagaaaaaaaaattgctagtcatgtgcttttgaacttggttaagtgattgaactaacaaaatcgtccagggacaagtatttcccccaaactttacttctcaatcccaacatctcagggcgtcccttaagcgtatcacttgtgacttgaccacatcttcacagacacattctgcatccattactccgaaggccaaatttagtatgcatctgtccattcttttcttagctgtatcctcacaaaaaaagacagatcaatatactggaaaagacagctcaaggagtttatttccttttaaaactcatttgccattaaacaaataagccgagagttctcaaatgtggaaaatggctttgtcaagtttatgtgctccctttatttcaagttaaggttaacagaatggcacacacactctactaaggtctgacatgcccctcttgggtcctttttaactgctctaaagtgtagatatgaagagcatgattcctaaattgtcctcctcaagaggaaattcatatttcctcctcctcagagtaaggactgaataaaattatgtggtttaagtttgtcctgtttaccccaatactatactgctatttctcttttaaaaacaagcagaatcccagcactttgggaagcgaaagcaaaagaactgcttgagcccaggagttcaagaccagcctgggcaatgtggcaagatcccatctctacaaaaaaaaaatacaaaaactttttttttttttagacagagtctagctctgtctcccaggctggagtgcagtggcatgatctcggctcgctgcaacctctgcctcctaggttcaagcgatccttctgcctcagcctcccgagcagcgggactacaggtgcataccaacatgcctggctaatttttgtatttttagtagagatggggtttcaccacactggccaggctggtcttgaactcctgacctcgtgatccacccacctcggcctccccaagtgctgggattactggcgtgagccaccacccccagacaaactttctcttttttttgagatggaatctccctctgttgcccaggctggagttcaatggccgaatctcggctcactgcagcctctgcctcccggtttcatgagattctcttgcctcagcctcccaagtagctgagattacatgcgcccaccaccagtgcctggctaatttttgtagttttagtagagatggggtttcgccatgttggccaggcttgtctcaaacttccaacctcaggtgatctgcctgcctcagcctcccaaagtactggggttacaggtgtgagctaccgtgcccggccaattttttgtttgtttgtttgtttgtttatttagagacacggtcttgctctgttgcccagattggagtgcagtggcgtgatctccattcactgaaacctccacctcccaggttcaagcaattgtcttgcctc[133 bp omitted]tcagcctcccaaagtgttgggattacaggcgtaagccaccgtgcccggcctacaattttttgtatttttgtatgtatggtggtgtgtgcctgtggtccaaactactcaagaggctgaggcaggaggattgcttgagcccaaaggtttaggctgcagtgaaccatgatcatgccactgcactccagcctgggtgacagagcaagaccctgtttcaaaaaaataaaaaaccaaaaaaaaacccattacccatctgtcctgttctcctagagaagaatttagcctccttcgcaaagatatttgttaaaattataaatacataacttcaaagggtatccccagaaaaaatgtggaaaaattcttcccttaacattctaaattctgtaacttgtggcaaatttagccacataatatgcctttaaaatatgaacggtaaaaatacatatatatatatatatatatatatatatatatatatatatataatgtatatagtttttgagacggagtctccctctgtcacccaagctggagtgcagcagcgaaatctcggctcactgcaagctccacctccctggttcacgtcattctcctgcctcagcctcccaagtagctgggactacaggcgcccgccactacacccagctaattttttttatttttagtagagacggggttt[141 bp omitted]gtgtttcacaaagccctcagggtacaagaaatcctaaaagtgaggccgggtgtggtggctcactcctgtaatctcagcactttgggaggcggatcttgaggtcaagagatcaagatcatcctggctaacacggtgaaaccccatctctactaaaaatgcaaaaaattagctgggcgtggtggcggacgcctgtagtcccagctacttgggaggctgaggcaggagaatggtgtgaacccgggaggtggagcttgcagtgagccaagatcacgccactgcattccagcctgggcaacagagtgggactccatctcaaaaaaaaaaaaaaaaaaaaaagaaaaagaaaagaaaagaaatcctaaaactgcctcatatagtcacagcactgcttacagagaaataacaatctacaatccaaacaacagattaatttcaaactagtttatatactctgttctaattatgttttacctcaaggaactttttaaattagctaaccactataaaaaccaaagtctcattataaaacatgcatacaggcatgcctcattttattgcactttgcagatactgtgttttttggtttttttgagatggagtctcactctgttgcccaggctggagtgcagtagcgcaatctcagttcgctgcaacctcggcctcctgagttcaagcaattctctgcctgagcctcccaactagctgggattacaggcatccgggatgtctatgctgcactgaactgtgattacacccctgcactccaggctcggtggacaaagcaagatcctgtctccaaaacaaacaaaaaagtactttaaagtatggcacagtggctcattattcccaacaccttgggaggctgaggcgggagtattgctcgagtccaggagttcgaggctgcagtaagctataactgcaccactgcactctagcctgggcaacacagaaaataagatcctgtcaccccactcccagaaaataaaaattaaagtatgtatttttttttaagacataatgctaccgaatacctgactacaatataaacttttttttttccaagacagggtcttaccccgtcaacatagctggactgctgtggcgcgatcacagctcattgcagcctcggcctccccccgagctcaggcaatcttctcacctcagccttcagagtagctggaactacaggcatgcaccactgcacctggcttttattttttgtagaaacagggtctcactatattgccagggctgaacataacttttatatgcactgaaaaaccaaaaaatttgtgtgactcgttttattgagatgacttctttattgtagtgctgcagtctgggaccaagcccgtagtccctgtgaggtatgcctctatttcctaccacaaccagcagtaactttcaagtcaccatttagataatcagaactctaactcatcctgtagatggatgctttgcttcttagggtaccaaagagacagtgagactctgtctcagaaaaagaaaaaaaaaaagataaaaacaaaagacaacttacatgtgggagacaccatgctaggcatctcaaacacacattgcctgggcacggtggctcattcctgtaatcccagcactttgagtggctgaggcgggtgggtcacttgaggtcaggagttcgagtccagcctggccaacatggtaaaaccccatctctaccaaaaatataaaaaattagccaggtgtgatggcacacgcctgtaatcccatctactcgggaggctgaggcaggagaatcacttgaacccaggaggcggaagttgcagtgagctgagatcctgccactgcactccagcctgggggacagaac[142 bp omitted]aaccccgtctctactaaaaaatacaaaaaactagccgggcatggtggcgcgtgcctgtagtcccagctactcgggaggctgatgcagaagaatggcgtgaacccgggaggcatagcttgcagtgagtcaagattgcgccactgaactccagcctgggcaacagagtgagactccatctcaaaaaaaaaagtaaaataaacagggcgcggtggctcccgcctgtaatcctagcactttgggaggccaaggtaggcgcatcacctgaggtcaggagtttgagaccagcctggccaacacagtgaaaccccgtctctactacaaatacaaaaaaatcagccaggcatagtggtgggcgcctgtaattccagctacttgggaggctctgtctccaaaaccaaacaaacaaaaaaaccccacaaattttaaaaaaacaagctggtggcactgtacatataggaaaattagtctagctgattcaagagtaaaattcatacatatacaaacataaagaaaaatctactgcattcctgttgtcactggcaatgctcatttgctatagaaacagggaatgtaaagagtgtatcaaaacaaaggtacagcagccgggcgcggtg[168 bp omitted]gaggcaggagaatggcgtgaactcgggaggcagcttgcagtgagccgagatcgcgctactgcactccagcctgggcaacagagcaagactccgtctcaaaaaaacaaaaaacaaaggtacagcagattaagagaaataacacataatactacatggtgacttgatggtagattatattggtaggttgacaatcagtatggacaaaaacaatcaacaagcattaggatactatctctagtcccagttttatagtcaccgtctatttcacaacttttctggaacttggctttctcatctataaaatggcagtgaggccgggcgcagtggatcatgcctgtaatcccagcactttggaaggccaaggcgggtggatgaactgaggtcaggagtttgagaccagcctggctaacatggtgaagccctgtctctactaaaaatacaaaaaaattagccgggcatggtggcgggcacctttagtcccagctactggggaggctgagg[132 bp omitted]tgggcatggggtctaacacctgaaaccccaacactttgggaggccaagacaagggactgaggccagaagttcgagaccaaactggtcaacatggtgagaccccacctctaatttaaaaataataaaaatttggccgggcacagtggctcaagcctgtaatctcagcactttgggaggccaaggcaggcagatcacctgaggtcgggaggtggagaccagcctgaccaacatagagaaaccccttctctactaaaaatacagaattagccaggtatgatggtagatgcttgtaatcccagcttttccggaggctgagggaggagaatcagttgaacccgggaggcggaggttgcagtgagctgagatcatgtcattggtctccagttggggcaacaagagcgaaactccatctcaaaaataaacatttttaaaaaattaaaaaggggctgggcatagtggctcacgcctgtaaacccagcacattgggaggctaaggcagatagatcacttaagatcaggggtttgagcccggcctggacaatatggcgaaacactctctataaaaaatacaagaattagctgtggtggcatgcacctgcggttctagctactcacgaggctgagcagggaggatctcttaagacctggaggtggaggttgcagtgagccaagatcacaccattgcaccactccagactaggcaacagaggcataacctctttcaaaaagacctaagacgggaggctgaggcaggagaatggcgtgaacccgggaggcggagcttgcagtgagccaagattgtgccactgcactacagcctgggagacggaatgatgctccatctcaaaaaaccaccaccaaaagaaaccctaagaaacaaaaattaaaataataaagactgtagtgacctgtatatttaaggttctgaggatggatatatatagatattttctgtccctcaatattcttgaataggccaggcgtggtggctcatgccgtaatccctgcactttgggaggctgaggcgggtggatcacctaaggtcaggagttcgagaccagcctggcatacgtgataaaaccctgtctcgactaaaaatagaaaaaaaattagctgggcgtggtggcatgcacctatgaccccccagctactcaggaggctgaggttgcagtgagctgaaattgcaccactacactccagcctgggcaacaagaggaaaactccgtctcaaaaaaaaaatccttgaataaggaacgaaaactttattttaggttagggagtatttacttatgataagtgcaggctagaatggttcagtgttttatcagcaacaaaggcaaaatcagaactttttccttgccacatgtgctaccctataccctatgctccgtgcctcacttaatatacagaaaatacctggaaatccacgatactatggcccaatttttctgctagtatacttgcatattaacatgggacctagagaaacttttggaacaaggtgatatttataaaactgttattctttgtttggcatcagtatcagtctgtcagaaacaccaagtagctttatttccttcttgaaatgttacttctaagcaggcctatttatgttttttctaagcctcaattttctatttaatatttctcagaataaagaaaacagctcattttaaacaagaagtttatttaaacaacaagacgcttgacttgaagggaaaactatctaggattcttttttgttttagagtaatttatccctacttaaagacagattgccctacatgtaacagctacgtacaaaaaagttataaaattgtccttggttttacaatgataaatgaaaaacattaaaattctccaattgaacaaggtatgcaaggatttttatgttgttgttttttttttttgttaaaacagtgagagcaaaataacttactggaatataaagataagagctgaatgagcatgccactaatggagaaagggggtattttcacagaatcagtatttttccccatcccgtctccacttgatgtcaatcaaaacataccattggctgtttagttaaaaaaaaaaaaaatgcaatatgcttgtgcacatataccagttactttatgtacaataaaggaatggggaagggggaaatgaaagaatagagaaaactatacggtagtagtcaggatgtggtggaaccaaattgcagttttctaattgagaatgtaatcttggtctttaaagaacagagttctggagtaaagaagcaggttcccttttcagtagacacctcccgtctgctgttggaacacatcaattgtatcttcatcctccatttccaactagcataaaagaaaaaacaaatgtaaaagcactgattaagttctgaaaattaatgatttttgggtttaagtatgctgaaaacatgtacatgttccactaagttccaagtttcattattttagatgtctcatagcttaatgtatcaacacacttggtttaagtaatttttcacttggcttccttttttatgactattagataaaacttttttgttttttttttgagacaggatttctgtcacccaggctggactgcagtggcgtgatctcagctcactgcaacgtccacccctcaggttcaagcaattctcctgcctcagtctcccaagtagctgagattacaggcatccgccaccatgcccagctaatttttttgtatttttagtagagatggggtttc[132 bp omitted]tattagccaggtgcggtggctcatgcctgtaatcccagtactactggaggccaacattggaggattgcttgagcccaagagaccgagaccacctgggcaacatagggagacaacatctctacaaaaaaaaaaaggaaaaaaaaaaaaaattagccagccatggtgacacatgtccatactcccagctactcaggaagccgaggtgggaggatcaattgagcccataagatcaaggctgcagtgaactgagaccacaccagctcactccagcctgagtgacaaagcaaaagatcctgtatcaaaaaaagagaaaaaaaggctagggccacgcacaatggctcactcctgtaatctcaacactttgggaggctgaagtgggcgggtcacctgaggtcaggagttcaagaccagcctggccaacctggtgacaccccatccctattaaaaaaaaattttttttttttttttgagacggagtctccctgtgtcgcccaggctggagtccagtggcaggatctcagctcactgcaagctccgcctcctgggttcacgccattctcctgcctc[134 bp omitted]ggcctcccaaaatgctgggattataggcgtgaaccactgcacccggcctaaaaatattttttaaattagccgggcatggtggcatgtgcccgtaatcccagctattcgggaggctgaggcaggagaatcgcttgaacccaggaagcagaggttgtggtgagccaagattgtgccactggactccaacaccggtgacagagtgagacttggtctcaaaaaaaaaaaaaaaggtgggggggggcgggtgtggcagctcacacctgtaatctcaacactttgggaggccgaggcaggcagatcacctgaggtcgggagttcaagaccagcctggccaaaatggtgaaacccagtctctactaaaaatacaaaaaacaaaacaaaaaaattagctgggcgtggtggcgcacgcctgcacgcctgtaatcccagctacttgggaggctgaggcaggagaatcacttgaacccaggaggtggaggttgcagtgagccaagatcatgccattgcatgtgacaagaaactgtctcaaaaaaattaaataaatgaaagctgaatatgtctgtgtcgagggcccacagaagggtgatatgtttaaagaatctcgctgcactgcttagcaaagactgaaaacaaatctcaataaaaacccaaattaggctgggcgccggggctcacgcctataatcccaacactttgggaggccaaggtgggcggatcaccaggtcaacaggtcaaacccatcctggccaacatggtgaaaccctgtttctaccaaaaatacaaaaattagctgggtgtggttgcgcacgcctgtagtcccagctactcgggaggctgaggcaggagaatcacttgaacccgtgaagtggaggttacagtgagctgtgattgccccactgcactccagcctggcaacagagcaagactctgtctcaaaaaacaaaaacaaaaacaaaaaacaccaaaacaaaaaacccacggca[133 bp omitted]gaggcaggagaatcacttgaacctgggaggtggaggttatagtgagctgagatcacgccactgcactccagcctgggtgacagtgcgagactccaggtctcaaaaaaaaaaaaaaaaaacccaaattaataaaacatagtatgctcagatattaaataccatatagccgttaaaaaataagattttcatgtacagaaatgaaaatatctttaagatacagtagatacagtgttaggctaaaaacacaattttaaaactaagcagcagccaactcggtgcactgactatataagttagccatgctctgtaaggggcagttaaaaaaaaaaaaaagtacaccccaaggagcaaagcagcttattgtatgactacatttgtgtttttctattttttcttgcgatggagtttcgctgttgttgcccagggtggagtgcaatggcgcaatcttggctcactgcaacctctgcctcccgggtcaagcaattctcctgcctcagcctcccaagtagctgggattacaggcatgcgccatcatgcccagctaattttgtactgactccgtcaatacagaaaataaaataaaaacaacataaacaaataaaataaaaacaaaattagccaggcatcatggtgggcgcctgtaatcccagctactcgggaagctgaggcaggagaatcgcttgaacccaggaagcagaggttgcagtgagctgagatcacgccactgcactccagtctgggagacagggcaaaactccgtctcgaaaaataaaaaaataaaaaaaagctggggaggcaggaggcctgctaagatgttttaatttatcacaatcctgctatctaacaaatattgggagaataattctaaaacgaatcaattccaaattcttcaaaatgaagtaaaatgaattgcaaattcaacctgaagattttaaaatgcctcaaggtcacggatccaaacaaataactccttgtttaatatttgtaactactatagcagataatcccgttttagtggtgggtaaggagggcttaaagacaggaaatacattctaataactgagagtacagcacaatagatactttttactatttcttttaaaaccaaacaagcctgtcatctatctactaaaacaaaattatccaaatgtgaagttttacagtgaaactgtaaatgcctttaaaaaatgaggttcctgtaccagcctcatttatcaatagaatttagctcctccttgtggctacataccataattgcgcctttttttttttttttgacagggtttcactctttcacccaagctagagtgaagtggcatgacctccgcgctcactgcaacctcgactgtctgacacctttcccccgcccagattctcctggctcaatctcccgagtagctgggatgggattacaggtgagcaccaccatgcccggctaatttttgtatttttagtagagacggggtagtttcgccatgttggccaggctggtcttgaactgctgacctcaggtgatcaacttgccttggcctcccaaagtgctaggattacagtcgtgagctactgtacccagacttttttttttttttttttgagacaggggctgttacccaggctggagtgcagtggcactatctctgctgactttaatctccgcctctcgggttcaggtgattctcctgcctcagcctcctgagtagctgggactacaggcgtgcaccatcatgcctggctaaattttttttttttttttttgagtttcgctcgttacccatgctcgagtgcaatggcgtgatctccggctcactgcaacctctgcctcctgggttcaagcgattctcctgcctcagcctcccgagcagctgggattacaggccaccacacccagctaattttgtatttttagtagagacggggtttctccatgttggtcggagtggtctcaaactcccaacctcaggtgatccgcccacctcggcctcccaaagtgctgggatcacaggcatgagccactgcgcccggcgatgcctggctaatttttgtattttttggcagacacggggtttcaccatattgtccaggctggtctcaaactcctgacctcaagcaatctgcctgcctcagcctcctgaagtgctaggatgacaggtgtgaacaagtgcacctggcccgtaattccttttgagagactgtcaccagttgaaatgtcttcaaaatattcttcttttcagtacaactcaggggcttttccaattttcaaagattatcaacaaaactacaatctggatgtgctgcttcatgccacatttatcactttctagtttttactgggtgataaagttgaaattcaaaagtacatgggatccaatttaaatttctactatcacaacattgtaaaatatgtttcagaaactgtaagtcttctatttttgagacagagttttgctctatcgcccaggctggagtgcagtagtatgatcataactcactgcggcctgaaactcctggactcaagcacccctcccactaaacttcccaagaagctgggactacagacacatgctaccatgcccagctctttttctttcctgtagagaccaggtcttgctatattgcccagactggtcttaaactcctggcctcaagcaaccctcctgccagtgtcagtttcctaaagtgataggactacaggtgtgagccaccaagtcaggacaagactggaagtcatttttttttttttttgagagagggcctcactttgtcacccaggctggtgtgcagtggtaccatcttgggtgacggcagcctccacttcctgggctcaagcaatccttccacctcaccctaagaagtagctggtactacaggcacgtaccactgctccctggctaatttttgtatttttttgtaaagagagggttttgccatgttgcccaggctggtcttgaaatcctggactcaagtgctccgcccaccttggcgtcacagtgctggcattacaagcactttgtaatcttgaaaatggctctcatgagccaccctgctaggacaaaactggaagtatttaatggaactttgaaagggtaaaaagaaacaaagagcttctgccacagaagacaatccagctgatcctacagaaagtgacagaacaaaatgaagtggtacataaagagttaaaggatcagagagcatcacgttttgtagtaaggatctggaaaatctcctattatcaggggctctccctgtcaaacaaagctatgggacgtggcaattagggctattagttcctttttgttcatgaagacacgtaaaagagaatttcaattcagcatgtagaactaaaatggtgaggatttggctgggtgcggtggctcacacctgtcaatcccaacactttgggaggccaaggcgggcggattacttgtggtcagcagttcaagaccagcctggccaacatggtgaaaccccatccctaccaaaaatacaaaaattagccaggcatggtggtgcatgcctgtaatcccagctactctgggaggctgaggcaggagaattgcttaagcatggcaggcgagggctgccatgacccaagatcgtgacactgtactcaagcctgggcgatggagtgagattccgtcacaaaaaacaaacacaaaccactggtggggttgggcacattgattcgtgcctataatcccatcactttgggaggccaaggctgcagtgagctataatgaggccactacacttcaacccgggcaacagagaggccctgtccctaaaaaaataattaaaatgaaaattaaaaataaatgaataaaaaccattggcatttcctgagcctattcctattttcctttctgttcccctctggtcatacttcccaaagctctgaactctacaagaacttatactccagtgtctaaacgttcaaattcataaacacagctgttcaaagaattacaaatggtaatttttctaattaggagagatttttttacctgtgcaggtgtgtctgtttcattgattggttgcccgtcaaatcggaatctgatctgcctcattgacaatccctgaacgagaatttaaaagcaataaacagcattaagagaaacagaattctatttacataaaagtacatgcatatttaaccatgaatatattaaagaaatacctaaataaacaattgccaacatgttaacataccctataggtaaaaagatttggggtgattttcattttcttttttttgagacagttttgatctgttgtcaaggctgaagtgcagtggcgtgatctcagctcaaggcaacctacacctcctggttcaagcgattcttctgccttagcctcccaagagtagctgggactacggtcccccgccacaacaaccggctaatttttgtagttttagtagagactgggtttcatcaggttggccaggctggtctcgaactcctaacctcaggtgctccgtccgcctcagcctcccaaagtgctgggattacaggagtgagccatggtgcccagcctctcattttcagtgaacagtaagatgtagtattttttttccttttcttttttttttgagacagagtcttgctctgtcactcaggctggagggcagtgtcgcgatctcggctcactgcaacctccaccttttgggttcaagcaattttcctgcctcagcctcctgattagctgggactaggcaggcgccaccatgcctggctaatttttgtattttttagtagaaacagggtttcgccatgttggccaggctggtctcgaactcctgacctcagatgatctgaccacctcagcctcccaaagtgctgggattacaggcataagacactgtgcccggcctgtttgttgttgttgtttttgtttgtttgttaagacagagttttgctatgtcgcccaggctggagtgcagtggtgcgatcttggctcactgcaacctccgcctcctgggttcgagtggttctcctgcctcagcctcccgagtagctgggattacaggcgcttgccatcatgcccagctaatttttgtgtttttagtagagacagggtttcaccatgttggccagactgatctcgaactcctgacctcaagtgatccactcacctcagcctcacaaaacgctgggattacaggtgtgagccactgcgcccagccagtaagtcattcttttagaaagctttactgcttttcagacacagctactataatgttaaatagaacataccttgagacaaatatgcatttaaatgagttagacaaggaaatgaaattttttttttttaaatggagtctcgctctgtcgcccaggctggagtgagtggaacaatctcagttcaacgcaacctccaccaccggagttcaagtgactttcctgcctcagcctcctcagtagctgggactacaggctcatgccaccatgctgggctaattttttgtattttagtagagatggggtttcaccgtgttagccaggatggtctcaatttcctgacctcgtgatccgcctggctggccactaacaggaaatttaaaggaaaaaaatgcccatttaaagactccagtctgagctcgggggctcacactgtaattccaacactttaggagaccaaggcagatcatctgaggtctggagttcaagatcagcctggccaatatggtgaaaccccgcctctactgaaaatacaaaaattagccgagtgtggtggcatccgcctgtaatcccagctattcgggaggctgaggcaggaggatcgcttgaacctgggaggcggagtttgcagtgagccaagatcgtgccctagcactccagcctgggtgacagaccagattcaatatcaaaaacaacaacaacaacaacaaaaccgacctaaaatgccccaacctacacccttgaacttcctggaatagctttaaaaaagcaccgctttttaatttcctttaatacttacccaaatctgtaattacttactgtcttactaaaaaacacacttcaggagatataggaacctagactgttttagttacacagtctatcccttgcacatagtaggtgctgctcagtaagtatcagtggcataaaagggatgaaaaacagtatataaccatcatctacttaaaaacaaaggccaagtattgtggctcacgcctgtaatcctagcaccttgggagactgaggtggaagatcacctgaggtcaggagttcgagaccagcctgtccaacatggtgaaaccccgtctctactaaaaacacaaaaattggctgagcacaatggcacacacctgtagtcccagctactccagccggaggttgaggggggaaaattgcatgaacccgggaggtggaggttgcaatgagccgagatcgtgccattgcaagagcgagactcttgtctcaaaaaaaaaaaaaaattaattaattaaataaataaaaatacaaaaaattagccaggctaggtggcaggcgctgtaatcccagttattcaagaggctgaggcaggagaattgcttgaacccaggagcagaggttgcagtgagctgagatcatgccactgcactccagcctgggcaacagagcaagactccatctcaaaaaaaaagaaattaaaaaatttgcatggtggccaggtgcagtggctcacgcctataatcccaacattttggaaggccaaggcaggtggattacctgaggtcaggagtttcagagcagccaacctgatcaacatggtgaagccccgtctctactaaaaatacaaaattagccaggcgtggtggtgcatgcctgtaatcccagctacttgtgaggctgaggcaggagaatcactggaacctgggaggcggaggttccagtaagcctagattgcgccattgcattcagcctcagtaacaagaggaaaa[132 bp omitted]caacgtggtaaaaccccgtttctacgaaaaataaattagccgagcacggtggtaggtgcctataatcccacctactcaggaggctgaggcaggagaattgcttgaacccgggaggtggaggttgcagtgagccgagattatgtcactacactccagtctgaccgacaaagcgagactccgtctcaaaaaaaaaaaaaaaaaaaaaaagaatcgcccagtggcacaagcctatagtcccaactacctgggagcctgaggtgggaggactgcttgagcctgggaggcagaggatgcagtgagccatgatcataatcctcccactgcacttcagcatgggcaacagggcaaaagcctgtctcaaaaaaaaaaaggcaaaattttgcaattgcagaaaagttaaataagatatgcataagaatagtgttcaaggccaggcaccagtggctcacacctgtaatcccagcactttgggaggccgaagcaggcggatcacgaggtcaagagatcgagatcatcctggccaatattgtgaaaccccgtctctacaaaaaatacaaaaattggctgggcacggtggcacgcacctgtagtcccagctacttgggaggctgaggcaggagaatcgcttgaacccaggaggcagaggttgcagtgagccgagatggtgccactgcactccagcctgggcaacagtgcgagactctcaaaaaaaaaaaaaaaaaagaaaagaatactgttcaaaaccaccaaactgaagcatgattctgtttgtttgtggttttgagacagggtctcattctgtcacccacactggagtgcagcgatgagatcatggctcactgcagcctagacctgccaagctcaagcaatcctcccacctctgtcactgaaatagcctggactacaggtatgtgccaccacaaccacctaatttttttttaagagatgaggtctgggccaggcgcagtggctcatgcctgtaaacccagcactttgggaggctgaggcgggtggttcacgaggtcctgtaatcccagtgacttgggaggctgaggcagaagaatcgcttaaaactggaaggcggaggatgcagtgagccgagattgcgccactgcactctagcctgggcaataagagcaaaactccacctcaaaacaaaacaaaaaaaccagatgaggtcttactatgttgtccagactggtcttccagccttggcctcccaaagtgctggattaccacgcccagcctatgattttctattttgtatgcagttttgctaaagaagttctccaaaaggattaccttttaaaattcccctgtatcctgaaggggcactagtgttcaaatatagaagatgccagtttataaattatttaacacaattcataagttcatgtagggtg[135 bp omitted]atatggtgaaaccccatcttgctgacaatacaaaaattagctgggcgtggtggcgtgcgcccgtagtcccacctactcgggagactgagacaggagaatcgcttggtctcgggag[138 bp omitted]gcacagtattttcttattacattgtaaatacactaggcataaaaatacttcaaacattctaaagtttttttttttttttcctttgaaatgctctcgctctgtcacccaggctagagtgcagtggtgtgatcttggctcactgcagcctccacctcccaggttcaagggattctcagcctcagcctccggagtaggtgggattatgcgcgtgtaacaccacgcccagctaatttttttggatttttagtagaaatgggattttgccatggtggccaggctgatgtcaactgccacctgcctcagtctcccaaagtgctgggattacagatatgagccactgcatcaggcctaaaggaagtttttatcttcactgatctttcaagtataaactcaaactcaatttcccaacttacataggtttaagccttattctattttgagcctatttagaacaatctgaaggggccaggcacagtggcccatgcttgtaatcccagcactctgagaggccaaggtgggcggatcacttgaggtcaggagttgaggtcaggtctactaaaaatacaaaattagccgggcgtggtggcgcacgcctgaaatcccaggtactcaggaggctgaggcataagaatagcctcaactcaggaggcagaggttgcagtgagccaagattgcaccactgcactccagcctgggcaacagagcaagactccatcaaaaacaaaaacaaaaataaaacacaatttacaaggtagataagttctagcttaaaagaaatagagtgagactcccagcttaaaaaaaaaaaaaaaaaaaaaaaaaaaaacgacttcttggtttggcgcggtggctcatgcttgtaatcccagcactttggaaggccgaggcgggcggatcacctgaggtcaggagtttggaaccagcctagccaatacggtgaaaccccatctctactaaaaatacaaaaaaaaaattggccaggcctggtagtgggcacctgtaatcccagatactcaggagactgaggcaggaaaatcgcttgaagtggaggttgcagtgagctgagctcaggccactgtacttcagcttgggcaacaagaatgaaactccatctcaaaaaaataaaataaaataataaaagacttataagtaattttaccaagttcactcttattttcttataaacataaaattacatttccttggtaaaaaaaaattattgtaaatataatttgatggatttctggcacaggactggaaccacatataatactaaccaaatcatcctaagggttttcacgagctatcaatataccaagtgcacgacaaaactgacgtgccaagtgcatattcatcccatcaaaaagtcactgtaatgtgctagtctagtttttgttcccatgaaaataagatttttaaaaatagttttattcagtggaagtacacatatgaattcctcacctgtcgttcacaataggctttcattagtttactaagtggtgtatgcctcttaatcttaaactgcaccacagaaccatcctgccccgccaccttcaaattaatatgatcgttgttctcagtcttgactccttcctgttaaaagaaaaataaaagtataatttgggaaatgtgatcaacgaacacgttttataaagcagcagcagccctagttgcttcaaaaatcaacaggtttctcatactgtatgctaaaacggcatactgctgttttcagctgctgaaatcaatgtgaaagcggaaaaatcctgcagtaacagtattagatagctgtcagatacggaaaagcctacatgcaatactatcagtagcaacaatatgtttaaagttgggtcctattcagtgtattgcaacgttctcttgaagttaaacttcctaaaatgacatatatcactcccaaaatactttaccccccaaaaaagttaaaaatagagtcccttctcttttctaagcactttaagtacaactgcaagaaacaaaacaataaatctacagcctgccattcaaaactcattaccgttgtcattaaaaagttaccaaactcagtttaataacctaaatccaatctccattaaaggaaacacacaaacaaaaaaaacaatcgaagaatatcccgattccccccggaacagcggtaatactcagtcaggaccacagttaacgttctcctctattagcagcttcatttttattttcggttaagagcacttattctcccctccccccctttgttgtcatgggtcaaatacacagttttatcctgatttgtttcttgtagatttcgacccaacctaaagttgtccaaaatcgagtgcagaagcaattctgtagccctaaaacgctccagaaagtaaaggcgcgggaggcggggggtgccaccaaactaaaagcagcaagtcccgtgtgccccgatgatgggtgtccccaagtcctcccgggaagtctccgggtgcctcaaaagccgcgttcaaaagttaagccgcacaaagtctctctgctcgtacctgtgcctccaacttcatgaaaccacatggtgttcgcggattaggggttcgttggcacccagggaaaagccgctgcccctcccccttcgggcccctgaggctattaaagtgggaaatactccacgggaatccccctacccccaggcccaggacggcggcccgcgggcatccaggttcctgcccgtccgcagcccattgattcgccccgaaccctcgccccgccgccgcggccccaggcaggggtccccagatgcccgcggttcctacccgagaggtgaagcccgagcccagaggactcctcgccgcctcggagactgcaacacccgacgcggggtcgacagaaggtggagaccccgcgcgccctaacgcccctcctcacgcgcgccggccggctgggccaagaatccccgttcggggctggtgggtccgcgggcgtccgctttctgcccgcccaactcgcgcccggcgcgcactcggaggccgccgggggcgggagagagcggcggggcctccttcggcgcgggagggaggaagagagggagggaggaaaatggcgcggagcgcccgggcctgagccgcggccggccccgtggggggcccgggaaagcgctgggagccagcggcgggctctggccggaccccggcccgcgccatgacccccaccgcgcggcgaggcgaaggggccggcggcgagctcaccttgggcttttcgtcggccatggcgagcgccggagtctcctcagctgccgcttcacaaaagaggtaccaggtccgcaccaaacgagcacacaagcagcaccaggagcggcagaagaaggaggcggcagcggtggacgaggggagagggtgcgcgcacgtcgtgcgctccctccccccaccctgcgtgcgcgagcacgagtagccgaagcctcccattggctggcgcctcgcgggagcgcgcaacgcttacataaccacccccaccccccgtcccacgccaccgcgtcctgggccaggcgcccgcccggccggcgggaagaggcgcggacacgcgcacccggcccgccgcgggggcgcgcctggctctgggcggggctgtattgtcctccttcgtggtggagcataatcaaaatggcttccagctggtcctcggtgggaacgatgaggctcgaggctttagacgtaagccataggccagggaaggcagacttactagaggaggaaggggattcctaaatcaaagccccagcatgaggttctggaaaaatctctctcattcagtggaccagcagccctcccatggttacttcctctcagtcaatctcaacctgcttcccaccggactcttgcctaaaatgcagtgtcttcttcttcttcttcttcttcttttttttgagacggagtctcgctcagtcgcccaggctggagtgcagtggcacgatctcggctcacagcaacctctgcctcccgggttcaagtgattctcctgcctcagcctcccgagtagctgagactacaggt[187 bp omitted]ctagctacgggaaaatattcatgtattcattcaacgagatccttactcatcgcctgtcttccaagaggaaacagtatccataagcgagaactacccaacaatcaagcttccagccaatttaatcctttcctcgttgcatccagttaaaacatacacatgcgtccctcctgtctgaagaacaatccgatgtgtgtgcactggattccatctcgcttcttcccccggggctttattatttccttttgtccctgaattttcttcctctcctccgttagtatagaaaaaaaaaaaaaagctcccaattctatgaagttaccatcctatctctctccattcttggccaaacagctcgaaaaaatgtccccgccagctgtctccaacccctcccctcccactcactcctcaacccactgcaatctggtgctgtccccaaagttccactaaaactgctctccacaaggtcaccgcagacttctttgctgaatccagtatgcttctcagtttgtcactcctcttgaactttgcaggaggtaggttttcctctcatctctagcctgtcctttgttctctctgcaattttttttcttactcactccttcccttaactgttccttagggttttcttcaagatccttttatcactccattccctctccgaggatgatttcaccgattttcattaccatctctttgctaatgatcctcaaatccattatttctagtccacgtctttcttctgagtttccagttgatttctgaacatctccacttggatatcccagaggcacctcagacccagcaactctcaactaaaactcctcactttaccttccacatgggtccttcttcctgacctgtcactcttaaactgagtgacacaccactacaacagctgccccaagctggaaaggccagcaacattcctgacttcttctccttcacacactcctcatccaatcaatcttggccaaatcttgtctattccaccttcttaccaaatctaatttctttggcctctggatggagctgcatttgctggccttctgtaggttctctttggggaggaagaggcttaagaccttagatgtgtgataggccaaagcaggaagac[132 bp omitted]agaaaccctgtctctactgaaaatacaaaattagctgggtgtggtggcgcatgcctgtaatcccagctactcgggaggctgaggcggaagaatcgcttgaacccgggaggaggaggttgtggtgagctgagatctcaccattgcactccagcctgggcaacaagagcgaaactccattaaaaaaaaaaaaaaaaaaaaacactctcaagagatactgcaatatcagccgggcacggtggctcatgcctgtaatcccaacactttgggaggccgaggcgggcaaatca[241 bp omitted]atggtgaaacccagtgtctctactaaaaatacaaaaattagccaggcatggtggcaggcgcctgtattcccagctactcagggggctgaggcaggagaatcgcttgaacccagtaagtagaagttgcagtgagccaagatcacaccactcactgcactctagcctgggcaacagagcaagacttcgtctcaaaaaaaaaaacaaaaaaacaaaaaaacacaaagatactgcaatatggaaataccctcctaactcatctgtttttttttgttgttgttgttgtttgttttgttttagacggagtctcgctctgtcgcccaggctggagtggcacgatctcggctcactgcaacttctgccccccgggttcaagcgattcttctgcctcagcctcctgagtagctggaactacaggcacatgccaccacgcccggctaattttttgtatttctagtagagatggggtttcaccgtgtt[133 bp omitted]cttgtggcccaggctggagtgcaatggcaagatctcagctcactgcaaactccgcctgccaggttcaagcgattctcctgcctcagcctcctgagtagctgagattacaggcatgccatgcaccaccgtgcctggctaattttgtatttttaatagagacggggtttctccatgttggtcacactggtctcgaactcccgacttcaggtgatctgcccactttggcctcccaaagtgctgggattacagacgt[151 bp omitted]cccatctctactaaaaatacaaaaaattagccggacgtggtggcgggtgcctgtagtcccagctactcaggaggttgaggcaggagaatggcatgaacctgggaggcggagcttgcagtgagccaagatcacgccactgcactccagtctgggcgacagagcgagactccgtctcaaaaaaaaataaatagtacctccattattcatggatttttaaatgagtcagaatcatctaaagggctggtttaaatacaaatttttgggccccttggaaggttggctctggaattcacctaatttttttttttcttttttaagaaaggtctgctttccacccaggatagagtgcagtaccgcaaatcatagctcactgcagcctcgaactcctgggcttaaaccatcctctcgcctcagcctcttgagtagctaggactacagacaggcaccaccacgcccacctaatttatttttattttttatagaaatagcatctcctggccgggcgtggtggctttttattttttatagaaatagcatctcctggccgggcgtggtggctcatgcctgtaatcccagcaagaatcacttgaacccgggagacagaggttgcagtgagccaagatcgcgccactgcactccagcctgggcaacaagaatgaaactccatctcaaaaaaaaaaaaaaagaaagaaagaaagaaatggcatcctgggctcaagtgatcctccagccttagcctcagcctctcaaaacgctgggattacaggcatgagccactgtaccctgccaaatctgcctgttttgttctctttttggggaaggtctcactctgttgcccaggctagagtgcattggtgtgatctcaactcactgcaacctctgcctcttgggctcaagggatcctcctgcctcagactcccaagtagcttcaactacaggtgcatgccaccacacaaggctaatttttttaaaattttttgtacagatggggctctcactatgttcctcagactggtctcaaacccctgagctcaagagatcccctcacctcagcttcccaaagtgataggattataggtgggagccactatgcccagccctggtaattcttaaacacactaaagtttgaggccgggcacggtagctcatgcctgtagtcccagcactttgggaggccgaggtgaggggatcacctgagctcaggaattcaagaccagcctgggcaacatggtgaaatcccgtctctactaaaaatacaaaaattagccgggcatggtggcgtacccagctactccagaggctgagacaggagaattgctagaaaccaggaggcagaggttgccatgagctgagactgcagcattgcattccagcctgggtgacagagtgtgaccctgcctcaaaaaaaaaaaaaaagtaataaataataaagtttgagaaacacaagccattataaaataaatataaatcaaaagggtcaggcactgtggctcacgcctggaatcccagccttttgggagaccaaggcaggcagatcacctgaggtcaggagttcaagaccagcctggccaacctggtgaaatcccgtctctattaaaaagataaaaattagctgggcatggtagcaggcgcctgtaatcccagctactcgggaggctgaggcaggggaatcacttgaacccgggaggcagaggttgcagtgagccgaaatggtgccactgaactccagcctgggtgacaacacagcgagactctgtctcagaataagtaagtaagtaaataaataaataaaaatacaaaaattagctgggcatcatggcggctacctgtagtcccagctactcaggaggctgaggcaggaaaatcgcttgaacccgggaggcagaggttgcagtgagccaagattgtgccattgcactccagcctgggcgacagtgcaagactctgtctcaaaaaatataaaataaaataaaaaataaaccaaaagaagtttctgatactccctggttcctcactaatcatctgcttcacaggatatgacctatgcgccctttgagaactaatccaaattaaccactctatagccttgtttctcatcctgaagcctctgctttggtcatattcaatcacttggggttcctaaatgttctctctcaactccaagcttttgtacgttgtaggcgttcgaggattcactgaatgaatgaatgaatgaatgaattgaaactatcagctggttgcagtggctcatgtctgtaattccagcactttgggaggacaaggtgagaggattacttgagcccaggagattatggctgcaataagctatgattgtgcccctgcactccagcctgggtgacagagtgag[132 bp omitted]ccaacaggcaaaaccctgtctctactaaaaatacaaaaattagctgggcatggcggtgcatgcctgtaattccagctacttgggaggctgagacaggagaatcgcttgaactcgggaggtggaggttgcagtgagccgagattgtgccactgcactccagcctaggtgacagagcaagaccctgtctcaaaaacaaaacaaaacaaaacaaaaaaaccccattactatgtgtaagatactatgacactggagataccaagaaggggagacaaaatctctgactcatataacttatgattgggggaggaggaaatacacaagaagtgaaagagaaagagaaccaacaattgttgagtacctgccacctatcaagcactaagtgggacattactaatgttagctcattttcctcttacacaaatgattgcaagcaggtgtagtagttatttgctactctcaaaggggttaagtaaacatgctatcacatagctagaaagtagtgttaactgagctcctgctgtgtgctagggaaaagacaaagagatactggccgggcacagtggctcatacctgtaatcccagcactttgggaggctgagacaggcagatcacctgaggtcaggagttcaagaccagcctggccaacatggtgaaacccggtctctactaaaaatacaaaaaacagctgggcgtggcagcaggcgcctgtaatcccagctactcgggaggctgaggcaggacaatcacttgaacctgggaggcagaggttgctgtgagccgagattgcaccactgcactccagcctgggcgagaggagcaagactctgtctcaaaagaaaaaaaaacccaaaaaaaactacctgacaacctattacactaaattacaaaa[140 bp omitted]ggtgaaaccccatctctaccaaaaatacaaaaaattaggtgggcgcggtggcaggcgcctgtaatcccagctacttgggaggctgaggcaggaaaatcacttgaacccaggaggcggaggttgtggtgagctgtgatcctgcactgcactccagcctgggcgacagagtgagactccatctcaaaataataataataataataataataataataataataatgctgcatgttcaaggccgggctcagtgactcacttctgtaatcccagcactttgggaggctgaggcaggtggatcacctgaggtcaggagttcgagaccagcctggacaatatagtgaaaccccatctctactaaaaatacaaaaattatccgggcgtggtggcgcacgcctataatcccagctgctcaggaggctgaggcaggagaattgcttgaacctgggagatgaaggatgcagtgagctgcgatcacaccattgcactcctgcctgggcaacaagagcgaaacttcatctaaaaaaataagaaaaacaatagctgggcacagtggctcacgcctgtaatcccagaactttgggaggccgaggcaggtggatcacctgaggtaaggacttcaagaccaaccttgtcaacatggtgaaacctcgtctctattaaatatacaaaaactagctgggtgtggtggtgggcgcctgtgatcccagctacttgggaggctgaggcagcagaatcatttgaacttgggaggcagaggttgcagtgagctgagatcactccactgccctccagcctgggcaacaagagaaaaacttcgtctcaaaaaaaaaaaaaaatacatgttcaaatgtctgagcaatatgtattccaagggcacattgaaattctgggagctgggtctaggcaatgtactgaaattatattctgaaaatccttttgcaatttccaggaaaaaattgtgaagagatagaaatttcctattaatattctccctccatctttttttttttttttttttttgagatggagtcttgctctgtagccaggctggagtgcagtggcgtgatttcgcctcactgcaacctccacctcccaggttcaagcgattctcctgcctcagcctcccgagtagctgggaccacaggagcgagccaccacgctcagctaattttttatttttagtagagatggggtttcaccatgtt[132 bp omitted]gtgcactgaaaaaggatgctttggaaaaagaaagtgggtctgggcacactggctcacccttgaattcccagcactttggcaggcctggcaggctgagttgggtggttcgagaccagcctaggcaacagggtgaaaactcgtctctatcaaaaataccaaaaatcagccaggcatagtggtgcttgcctgtggtcggagctactcaagaagctgagatgggaggatcacttgagcccaggaagcaaaggctgcagtgagctgtgagctgtgatcacactactgctctccagcctggatgacgtaatgaggccccatctcaaaaaaaaaaaaaaaggaaaagaaaaagaaagtggactaggagacggtggctcatatgctcatatcagtaatcccagcaccttgggaggccaaggcacaaggatcacttgaggccaagagttcaagaccagcctgggcaacatagcaagacctttgtctctaataaataaaaaataaaatcaataaaaataagaataaaaaatttttttttgacacggagtctcgctctgtcacccaggctggagtgtaatggtgggctcttggctcactgcaacctccacttcctgggttcaggtgattctctcacctcagcctcctgagtagctgggattacaggctatgccaccatgactggttaatttttgtattattattatttttagagacagcgtctttcactgttgcccaggctggacaatctcagctcactgcaatctctcaggttcaagcaattctcctgcctcagcctcctgagtagctgggattacaggc[136 bp omitted]ctgcctcagcctccccgagtagctgggactacaggcacgcaccaccatgcccagctaattttttttctttttttgtatttttagtagagatggggtttcaccgtgttagccaggatggtctccatctcctgaccttgtgatccacccacctcggcctcccaaagtgctggggttacagatgtgagccactgcgccaggcccatgcccggataatttttgtatttttagtacagatggggttttaccatgttggccaggctggtctcgaactcctgacctcgcaatctccctgcctcggcctcccaaagtgttggga[138 bp omitted]gcctcagcct[135 bp omitted]cctcccaaagtgctaggattacaggcgtgagccaccacgcctgaccttctttttttttacagagtttcactcttgttgcccaggctggagtgcaatggtgcgatctcaactcactgcaacgtccacttcctgagttcaagcaattccccagcctcagcctccgagtagctgggattacaggtgcacgccaccacacctggctaattttttgtatttttagtagagatggggtttcaccatgttggctgggctggtctcaaactcccaacctcaggtgatccacccaccttggcctccaaaagtgctgagattacagatgtgtgccaccgtgcccggctaattttcgtatttttagtagagacggggcttcaccat[134 bp omitted]gtacaagaaagatagcttacacctgtaatcccaaaactttgagaggctgaggcaggaggattacttgaggccaggagttcaagaccaggttgggcaaggagaggtatacatggaaaaaaataacaatggcagatattaattgagtaattttatttttattttttgagacggagtttcgctcttgttgcccaggctggagtgcaacagtgtgatctcggctcaccacaacctctgcctcaccacaactgtgcatggccaaaactttttttgtaaggaaaagaacaaggaagatagcttacacctgtaatcccaaaagtttgagaggctgaggcaggaggattacttgaggccaggagttcaagaccaggttggaaaaggagaggcatacatggaaaaaaaaaaaaagcagatattaattgagtaattttatcttattttttttttttttcttttttttgagacagagtttcgctcttgttgcccaggctggagtgcaatagcgcgatgtcggctcaccacaacctctgcctccctggttcgagcgattctcctgcctcagcctcctgagtagctaggactacagacatgtgccaccacgcctggctaattttgtgtttttagtagagatggggtttctccatgtt[136 bp omitted]ctgttgcccaggctggagtgcagtggcgtgatctctgctcactgcaaccttgcctcctgggttcaagcgattctcctgcctca[413 bp omitted]gaggcaggagaatggcgtgaacccgggaagcggagcttgcagtgagccgagattgcgccactgcagtccgcagtccggcctgggcgacagagcgagactccgtctcaaaaaaaaaaaaaaaaaaaaaaaaagtgagatagagagaggatggttaaattggtcacctcgcttgaagtggcagagccagtatggaatttagatcttctgactcagagcccagtgcttaattattgtagaaccgctgctgtggaaagccacggagagaaaacataccgaaggaaggaaaaaaaattcctagaatagtaccaggagcaccagtcaagttgttgtgacctaaatttgtgtgtgtgtgtgtgtgtgtgtgtgtgtgtgtattttgtctcctccactggaacagaagttgcacagaagcagaggtctgtctgtgttaccacacttttatttccagcagcaagcagtttctgggtcctactaggtaaataaaagaattaatggggagagagttgtgcagtgagcagtttgtaccattaacggttaactagaaactctggtaagaggcccagtgcggtggctcacgcgtgtaatcccagcactttgggaggccaaggtggtcagatcatctgaggttgggggttcgagaccagcctgaccaacatggagaaacccccatctctactaaatatacaaaattagccaggcatggtggcgcatgcctgtaatcccagctactcgggaggctgaggcaggagaatcgcttgaacccaggaggtggaggttgtggtgagccgagatcgcgccattgtactccagcctgggcaacaagagcaaaactccgtctcagaaaaaaaaaaaaaaaaagagtaagggccaggcatggaggctcacgcttgtaatcccagcactttgcaaggctgaggcaggcagatcacttgaggtcaggagttcaagaccagcctgggcaacatgatgaaaccctgtctctactaaaaatataaaaattagcctggcatgttggcatatgcctgtaatcccagttacttgggaggctgaggcaggaaaatcacttgaacctgggaggcagaggatacagtgagcggagatggcaccactgcactccagcctgggcaacagagtgacactttgtctcagaaaaaaaaaaaaggaaaaagaaatacagagtaagaatagaatgaactgtcagggtgcagtggctcatgcctgtaatcccaggattttgagagaccaaggcaggagaatctcttgagctaaggagttcaaaacgagcctgggcaacatagcaaaaccccatttatgttacaaaaaaaaaaaaaaatgagcagtgagccaagattgcaccacttcactccagcctgggtgacagagtgaaaccccatcaaacacacacacacacacacacacacacacacacacacacacaaaggggggggtgaacgagccagaattccgcaggatcagctgccaaagaaaaatacatcattcttggggggaggggggagggatagcattaggagatatacctaatgctaaatgacgagttcatgggtgcagcacaccaacatggcacatgtatacatatgtaacaaacctgcacgttgtgcacatgtaccctaaaacttaaagtataataataataaaattaaaaaaaaaatacatcattcctaaaaggggtaagagggccgggcatggtgacacatgcctgtaatcccagcactttgggaggccaaagcaggagaaccacaaggtcaggagtttgagatcagtctcaccaacacggtgaaatcccgtctctgttaaaaatacaaaaactagccgggtgtggtggcccatgcctataatcccagccactcaggaggctgaggcaggagactcgcttgaacccaggaggcggaggttgcagtgagccgagatcgtgccattgcactctggcctgggcgacagagcgagactccatctaaaaaaaaaaaaaaaaaaaaaaaacattagccaggcatggtggcacacacctgtagtcccagctactggaaaggctgagccaagagaactgctggaagccaggaggtggaggttgcattgagccgagatcatgccactgtactccagcccgggtgagagagtgagactctgtctcaaagaaaataaaataaaaataaacaaaataaaatctaaaaggggtaggagaacaagaatcacagagttcgtttagagctttaagtccctgccagaacccctaaacacataccaaatttataatacaggtgactaaacttgtgtactttataccgtcaaatttccttcattctataacatagtttagttgagtacttcagctgtttgtgaatactgtatgaatgtaaatactgaattctggccgggtgcggtggctcacacctgtaatcccagcactttgggaggctgagacaggcagatcacttgaggtcaagagttcgaaaccatcctagccaacatgaccaaatgccatctctactaaaaatatgaaaattagctaggtgatagtgacgtgtgcctgtaatctcagttactcaggaggctgaggcaggagaatcatttgagcctgggaggcagcggttgtggtgagctgagatcctgccactgcactccagtctgggtgacagagagagaccctgtctcaaaaacaaaaaaaatcatgaatttctcaatactgcaggaagcctggaggcagaatggtgatgatattgtagaaaccctatcggctgggcttcagggctcacgcctgtaatcctcgggaggccgaggtgggcagatcacttgaagtcaggagttcgagattggcctggccaacatggtgaaatctcgtctctactaaaaacacaaacattagctggacatggtgatgtgtgcctgtagtcccagctactcaggaggctgaggcaggagaattgcttgaaaatgggaagaagaggctgcagtgagctgagatcctgccactgcactccagcctgggcaacaatgcaagattccatctcaaaaaataaataaagtaattaaaaaaaaaaaaaaggaaagaaaccctttctacccgtgtcatggcaaaaatgatgggacccaagattgtactcatagtgaatgccaagaacttagtacaggctgagtatctctaatatgaaaatctgaaatgggaaatattccaaattccaaaacttcttgagtaccaacatgatgccacaagtggaaaattccacacttgataccttggctttctttctttctttcttttttgagacagagttttgctcttgtcgcctaggctagagtacaatgccgcaatctcacctcactgcaacctctgcctcctgggttcaagagattctcctgcctcagcctcctgagtagctgggattataggcgcctgccaccactcccggctaattttttgtatttttagtagagacagggtttc[132 bp omitted]cgctctgtcgcctaggctgggatgcagtggcatgatctcggctcactgcaacctccgcctcctggattcaaatgatcctcctgcctcagcctcccgagtagctgggactacaggcacgtgccaccatgcccagctaattttcgtatttttagtagagacggggtttcaccatattggccaggttggacttgaactcttggcctcccaaggtactaggattataggtgtgagccaccgtgtctggcctttttttttttataattaaattttattttattttgtattgagacagtgtctcgctctttggcccaggctggaatgtagtgacaccagcatggctcactgcagcctcaacctcctgggctcaagcgattctcccacctcagcctcccaagtagctgggaccacaagcatgtgccaccatgctcggctaattttttaatttttaaaatttttttttactttttaaaattttttttttgagacagtctcgctctgttgcccaggctggagtgcagtggtgagatctcggctcactgcacgctccgcctcccaggtgcatgccattctcctgcctcagcctcctgagtagctgggactacaggtgcctgccaccacgcccagctaattttttttttttt[240 bp omitted]cctca[225 bp omitted]agacagtctcactacgttgcctagactggtctcacgctcctgggctcaagcgatcctcccacctcagtctcccaaagtgctgggattacaggcatgagccacagcacccagtccacctttgctttctttctctttccttccctccctccctccttcctttcttgctttcttttctgtctctctctctctctcttctttttttgttctttgaaacagggtctcactttgtcatcggagtgccaggatctcggctgactgcaacctctgcctcttgagctcaagcgatcaccccaacctcagcctcctgggtagctggaactatagcatgtgctaccacacctggataattttgctgttttctatagtgatgaggtctcattatatatatacagtccttctaatacgtcagttgggatattgaatgcagggaaatagtgtcacatttcacaatattatacattcactgaatactgacatacacaatactttatattcactgcctattgatatacatattgtacaaacataacttaagagaacagtcctgtaagctttttgtgtgcaggtatcattgcctttcatctttgtagtctcagcaaatagcaaagtcctgagagccagtaatcaataagtgttcattgacttattgatgcagcaataactttgtgtagtacttttcttttttttgagacaagagtctagtgactctgtcacccaggctagagtgcagtggcaccatcttgtctcactgcaacctccgcctcccaggttcaagtgattctcctgcctcagcctctctagtagctgagattacaggcacctgccaccacatcaagctaattttttgtatttttagtagagacagggttttaccatgtaggccagctggtctcaaactcctgacctcgagtgatctgcccgccttggcctcccaaagttctggcattacaggtgtgagccaccgcacccagccagtactttttatgagaaggccaaaaatgcttaaacagggtctcccaaatgcctgtcagttacacagcttcaacactgatatgacaatttcaagttctaggccgattaatgctcaaatcctacctctctgtacattagtggattcacatagggcactgaaatgaggcccaatgacttgaagctgtttgtttcataaaatgaacagaaacaatatgaataaagctatattttgcagatttgtgtgaatatagatattatctgtactcttctatcttctctcaataattgattacatacactctatccaggagtatgaggctgcagtgaactatgattgagccactgaactccatcctgggcagcagagcaagtctctgtctctaaataggccaggcaaggtggttcttgactgtaaccctagcactttgggaggccaaggttggagaatcgattgagggcaggagttagagatcaccctgggcaacataatgagatcttgtctctacagcattttttgttgttgttgttgtttgtttgtttgttttttgagacagagtctccctctgtcgcctaagctggagtgcagtggcatgacctcggcttattgcaacctccacctctcaggttcaagtgattctcttgcctcagcctcctgagtagctgggactataggtgtgcgccaccacgcctggctaatttttgtagttttcatagagactgggtttctccacgttggtcaggctggtcttgaactcccgatctcaggtgatctgtccgcctcagcctcccaaagtgctgggattacaggtgtgagccaccgtgcctggcatttttttttttttttgaaatggagtcgtgctctgccgcccaggctggagtgcagtggcatgatctcagctcactgcaacctttgcctcccgggttcaagcgattctcctgcctcagcctcctgagtagctgggactacaggcatgggtcaccatgcctggctattttttgtatttttagtagagacagggtttcaccatattggtcacgctggtcttgaactccttacctcaggtgatctgccagccttggcttcccaaagtgctgggattacaagcatgagccaccgtgcccagccccaaataaccttttaataagaattctgcataaaaattatttgtgaggcacttcttttattcatttaaatctcctttttggtgcttatataaaacacatctctcttgattatttcttggaagtgtaattatgaggacaaaaagatgaacattttcaaactttttgaaataatttttcatgtcctgtcagtcttcatagttattttaaacaggtgagtaaagtaacatctcactgatataatttatttagctaacttctacggttgaacatatataccagcagctcttaacagaggtgattttgccccctagaggacactgggaatatatgcagatattttcagttttcacaattgtgggatgttattggcatctagtgggtaaaggtcagaagttggagttcttgttcttggtggggtgttgttttgttttgttttgttttgtttttttgagttggagttttgctcttgttgcccaggctggagtgcaatgacgtgatctcatctcaccacaacctctgcctcctgggttcaagcgattctcttgcctcagtctccctagtagctgggattacaggcggatgccatgaagcccagctgatttttgtatttttagtagagactgtgtttcaccatgttggtccaggctggtttcgaactcctgacctcaggtgatctgcccacctcagcctcccaaactactgggattacaggtgtgagccaccgcacccagcctgtttttttgtttttgttttttttttttctttctgagacggagtctccctctgtcacccaggctggaatgcaatggcatggttttggctcactgcaacctccgcctcccgggttcaagtgattctcctgcctcagcctccggagtagctgggattacgggtgcctgccaccatgcctaatttttgtagttttagtagagacggggtttcaccatattggccaggctggtctcgaactgctgacctcgtgatccgcccacctcggcctcccaaagtgctgggataacaggcgtgagccactgcgcctggccatattgttgcttttgaaacagggtcttgctggagtatagtgctataacaatcgtagttcactgcagccttgacttgaactcctgggctcaagaaatcctctggcctcagtctccttcctcttgctgtagctagggctacaggtatgtgccactagttccagctagagtttttttttttttttttttttttttttttttttttttttttgagagggagtcttacactgtcgtccgggctggagtgcagtggtatgatcttggctcactgcaacctccgcctccagggttcaaacgattctcctgcctcagcctcagtagctgggactacaggcgcacaaccgccatgaccaaataattttttgtattttagtggagacggggtttcatcttgttgcccaggctggtcttgaactcctgagctcaggtaatccgcccgcctcggcctcccgaagtgttgggattataggcgtgagccaccgcgcccggcctttttttattttttattttttgagacagcatcttgctcttgccctgttgcccaggctgaggccagagattttgttaaataatgtacactgtgcccggttcaggagcattagttttattaggctgcatgaaatgtatccacttaagactttaccaggctgggtgcggtggctcatgcctgtaaccctagcactttgggagtctgaggcgggtggatcacctgaggtcaggcgttcgagtccagcctgaccaatatggcgaaaccccgtctctactaaaaaataaaaaattagcccggcgtagtggcgtgtgcctgtagtcccagctgctcgggaggcttaggcagcagaatcgcttgaacccgggagacggaggttgcagtaagccgagatcgtgccactccactccagcctggcgacagagcaagactctgtctcaaaaagacaaaaaaaaaaaaaaaaaaaaaaagacaaagaaaaaaaaaagagagagagagcttgttagatcttagtgctatatttccttgattatttttattttaaggctgacaaaatgccatttaagataataaaagtagttaaattgcctgaccaagagctagataacattgaggaaaaagtattggcaatattctttggtctaatactgctatataccaaccattttacccaatcattcaaataggcttagtaatacaagggcgaaaaag[133 bp omitted]ctcctgtctcagcctcccgaggagctgggactacaggcacccgccaccacgcccggctgatttttttttttttttttttttttttttgtatttttagtagagatggggtttcaccgtgttagccaggatggtctctctctcctgacctggtgatccacccgcctcggcctcccaaagcgctgagattacaggcgtgagccaccgcgcccggcctatccttgttctatatactgattacgcatactatatatggaccttttccttcctcaacctttctatagatttctaagaataaggttttgatgaagtagtttatgtatccttctttttcagttaatcctaatggaaaacggttggaaaaatgaaacaattatcttacaacttatttttctctttcctctcctcccctctctctaaaagagtgtggctccttcccctctcttttccccttcctctctctagagtggttaactctcaaactgtatttaactctggaaaagttttcaattacacaggcgataactccaacttgaggtataacggaaacttattaagagaaaaagagcaaaataatttttttttgagactcagcaaaataatttttttttttttgagacggagtctccgtctgtcgcccaggatggagtgcagtggcgcgatcttggctcactgcaacctccgcctcccgggttggaacaattctcctgcctcagccttacgagtagctgggattacaggtgtccgccaccactcccggctaatttttgtattttcagtagagacggggtttcgccatgttgtccaggctggtcttgaactcctgacctcaggtgatccaaccacctcggcgtcccggagtgctgggattacaggcgcgcgctaccaagcacagctaatttttttttttttttttgagacggagtctcgctctgtctcccaggctggagtgcagtggtgcgatcttggctcaatgcaacctccacctcccgggttggaacaattctcttgcctcagccttccgagtagctggaattacaggtgtccgccaccacgcccgtctaattttttatatttttagtagagacgaggtttcatcatattggccagactggtcttgaactcctgaactccagtgatccacccaccttgggctgccaaagtgttgggattagaggcttgagccacagcgccgggccttcaggggtatcgattttgttcccgtgcctcttgtgtgtgttctagtgtggaagtggaggcgattgctttccagcacaagcccgtttgactgtcggggtttggacaagtggctgcgacgacactaaggtggagaccgggatgtagcgaggactcccagagttgggagacgttgtacgcttactgggacctaaatcccgcacgagttcccacccaagtgccgccgccccagcctacgcacgcgcattcgcaccgtctccagccccggggtcctcctgcccctcccgccgtctccgggggccttttctccgctcggcaccagggtgtccccggcgccgcctgatcctgttagcgcggtactctgagtgcagtcagtcctcggcgctgttttccctgatttgctgtcgacgccaggaaggaaggacgcgtgcagaggaccgcagaggggtggccgtggctgagaggagacagcgccgcagcactgagggtttgggcttgcaggcgctgcaggagacgcccaggcggagtcttgtctcgcagccagctctgagcgggaggcctgagcgggaagcattggcgtccgagcgacttctaggagcctggggttcggcgctatggaggagctcgatggcgagccaacagtcactgtaagggtaccccgaacaggcttgctcgtccttgcgggttgagaactgcgtctgcttagttacttcaggcttgtctgcttccctagtggtcgcgaggcgctcgtccccttccctcgactcagttgccacttttccggaggtcgcagtgttaacgaggtgcccgccctagggtcgcagtggtcgcggggtttctgccaccagtcacaaaccccggcctcgaaggtcccactccgtccctttccttcctttgtgttcctggcctttttacttcccttgcttttcctcttgggcattagagtgggttcagcccaagcagaggaatttatatttttattccagccgtattaagctctgcatcgcggcacattgagcttctgcctgtgtggcctaaggtttattcaacgtattatctcaggagactattcctgttttatcgctgtgcattcaattccatttgaactttgaagacagtatgtcaactgtggatgatctgtgatgtgtataaaaaaaattcacgcgctttatgtacgagatacctaccgtttctgctagttggattgctcttgttttccctcttgttaaccagaagtgactgaggcaggtctcaaccgataaaggtttaattagctaaggttgaggatccaaccgggaaaaagcacaggtcacaggaggatctgagacctgtgctttttccaaagatggttttgggaacatcactagttaaagaggaaggagctagcaggaggggcaaaaaagggaggttaggcagtgaggaggcaaatgattacattcttgtgagtcggtgattagcctcagtaaatctgcattttacctgtgaaaagagggagcagaggaaaattttatgtatgcattcatctcagggtaggtagagggattatggttattattactgttattttttagacggagtctcgctctgtctcccaggctggagtgcagtggcgcggtctcggctcactgtaacctccgcctcccgggttcacaccattctcctgcctcagcctcctga[227 bp omitted]gtcagaatcaacagatcttgattttaggactagtttataggggcgatgtgtatcctgaaaattttagaggctcacaaggaatttccttgtgagcaatttgtgagggaagctctctggggagatatgtggccttcttttttttttctcttgaggcggagtttccctcttgtcgcccaggctagagtgcagtggtgcggtctcggctctctgcaacctccgcctcccaggttcaagcaattctcctgcctcagcctcctgagtagctgggattgcaggcatgtgccaccatgcccggctaattttgtatttttttagtagagacgaggtttctccatgttggtcaggctggtctggaactcctgacctcaggtgatctgccggcctcagtctcccaaagtgctgggattacaagtgtgagccactgcgcctggcctcattctttttttgagacggattctcactctgtcacccagagtggagtgcagtggcgtgatctcagctcactgcaacctctggctcctgggttcaagcgattcttctgcctcagtctcctgagtagctgagattacaggtgcgtgccaccacacccagctaatttttgtatttttggtagagatggggtt[133 bp omitted]tgaaaccccatctctactaaaaaaatacaaaaattagcctggtttggtggcgcgtgcctgtaatcccacctactcaagaagctgaggcaggagaatcacttgaacccagcaggcagaggttgcagtgagtcgagattgcgtcactgcagtccagcctgggcaacaagagttcgaactcctgacctcagatgatctgcccgccttagcctcccaaagtgctggcaggagccaccccgctgccggcccaaaatgaatttttcttaccagtgttataaggaaatgttattgaaggatacagtgttattagaggaccagctgtgctcttcacttaaagtgtttttcagcagggcgggcacggtggctcgcgcctgtagtcctagcactttgggaggctgaggcggacggatcacctgaactcaggagtttgtgaccagcctgggcaatatggtgaaactctatctctactaaaaatgaaaaaaaaaaaaaaaatagccgggtgtggttgcacacacctgtagtcccagctactcaggaggttgaggcaggagaagcctttgaacccaggaggcggcgattggagcaagctgagattacaccactgtacaccagcctgttagagtgagtctttgtctcaaaaaaaaaaaaaaaaaaaaaagaatggaacaacttcagtaagaagaacatttttcattttagatttctatgccttattttactagttgattccaggcgtgaattccaagaagaaccaaatgtattttgactggggtccaggggagatgctggtatgtgaaacctccttcaacaaaaaaggtagggttttttttcttccaaattatccatcttggcacatttggttgtttttctgtttattacctcagattttactagttgtggactgaaacagttgaatttattttgtactattttaattttctctattttgttttcaagatacaacagggttttgttgtgtcacctgggctggagtacagtgtgatcatggctcactgcagcctctacctcttgggctcaagtgatcctctgcctcagtcttcctagtagctgagactacaggtcaccatgccaccacgcccagctaatttttttttctttgtagagatgggagtctcattttgttgcctaggctggtctcgcactcctggcctcaagcgatcctgttgcattttggcatttttatttttgaaatgttagctattttagattttcattgatttttgagatcttgaagatgttgaatcccggaaaaaaattaatagttttcatgaaaaattttcttcatatttaaaatgtcaagctttttatccctttttctttgtccaaagtgaccaaattcctatcagtagctcccttattgtgaaccttgcagatgcttggccgtcacttttgtgtccacagcatggattcagctgaataatagttctgtaggctgagctgagccgtagcatccaaggcacagatggagctggagagtgacatagcttgtccttggcttgattttcctgagttccatcagctattggataggatgtgaatctttttcttttcctgatacagtgatacagtctccttccagtagaaggataaaactggaatcttgacatttgatttgctttctttttttttttttttttttgagacggagtctcgctctgtccaggctggaatgcagtggtgtgatctcggctcactgccacctccgcctcccggtttgaagcaattctcctgcctcagtctcctgagtagctgggaatgaaggcatgtgccaccacgcccagctaatttttgtatttttagtagagacagggttttgctatgttggccagcctggtctcgaattcctgacctcgtgatctgcctgccttggcctcccaaagtgctgggattataggcaagagccaccatgcccggccacagaaaatttttttagagtagattcacttttggagatgatcataatagatgttaaattttttttttctgtttggtttcagaaaaatcagagatggtgccaagttgcccctttatctatatcatccgtaaggatgtagatgtttactctcaaatcttgagaaaactcttcaatgaatcccatggaatctttctgggcctccagagaattgacgaagagttgactggaaaatccagaaaatctcagtaagttggttgctgtttggtgttgaagcccacactacactgtggaaagccaaatgaagtacattgttgtctttttgtgtgttttatgggttgcgtaaagaaataagagactcctggttctagttgaggcatgagtactggacagtgtacattagcagtgatgggaagacttagcgggaatatgcaaatgctattgatgggctggcttgacaagctttatttatattcatattttacttagcctctaaagaagaaaatttaggccacacaagcatgtgagagtcgttgaatgaggtcacattgttgggagatttgaaaattaatataaacctaacagttttgtctctaaaaaattatggttcagacgttatttgacaacagaccagaaaactctcgtactatttatagattaggattttcttgaattgtagttcataacttcatcattatcagagtggtacttgttaattgtagacttttgggacccacctcagatcatcaaaatcaaaatctccgtggttggatcttaaaatctccagcacactgaagtttaagaactcctgtgttagatttttgtcagcgtcccttcacatggatggctagggaatgggcagtgttggtatgttacttctttgataagcttttcacaaatgaatcattctggacaagactcaggtcagcttctgtgtgagtgtgtgcaagagtgattattggttgtttttctgttttttttcgaggcagagtttcgctctgtcacccaggctggagtgcagtgacgcgttctccgctcactgtaagctctgcctcctggattcacgccattctcctgcctc[134 bp omitted]ggcctcccaaagtgctgggattacagacgtgagccactgtgcctggccctgtttttttttttttttttgagacagagtttcactctgtcacccaggctggagtgcagtggcgcaatcttggcccactgcagcctctgcctcctgggttgaagccattctcctgcctcagcctcctgagtagctgggattacaggtgcgtgccaccacgcctggctaatttttgcatttttagtagagatggggtttcatcattttggctgggctggtcttgaactcctgacctcaagtgatctgcccacctcagcgtcccaaagtgctgggattataggagtgagccactgcacctggcctgattattggatttaagggactctagtggagaatattggtgagtttgagaaatctattgtcacttctaggaaaaaaacatgtcaaaagtcctgtaattccttgctggcaggggaccctgtcttattctttttttttttttttcagatggagtctcactctgtcgcccaggctggagtgcaatggcatgatcttggctcactgcaacctccgcctgccgggttcaagagattctcctgcctcagcctcctgagtagctgggatttttgtatttttagtagagacagggtttcaccaggttggccaggctggtctcaaacacctgacctcaggtgatctgcccactttcacctcccaaagtgctgggattacacgcctgagccaccgggcctggccagtaaatacatttatgtatcttttttatttttttgagacaaggtctgaccagtagatttcatctgcaacaattaatggcagtatgggtttgtggatattaactttagcccatgggttgttttgtggcgttttattttgttgtccaagttgttccagcttcagaaggttaggagctccttcacaacggctctcctctttctttcagcaaatttctgcatttatttgagtgtttccttcctttgtggcactacaagatgttccaggctcatcttgtgtgttatttcattttttgtagattggttcgagtgagtaaaaactaccgatcagtcatcagagcatgtatggaggaaatgcaccaggttgcaagtaaggactgtgtgcgcgtgcgcgcgtgtgtgtgtgtgtgtgtgtgtgggtattttgagtatttatctatgcataaatactgtgaggtaaagtttgattgatattccagtccaaaacttatttttccatctttcataatccttacttttttggtaatcatttagaggtttttttttttgttgttgtttttttttttttttttttttttttttttttttttttttgagaccgagtgttgctctgtcgcccaggctgaggtgctgtggcatgaactcaggtcactgcaacctccacctcccaggttcaaacgattctctagcctcagcctcctgagtagctgggactacagttgtacacca[131 bp omitted]gagctcaccgcctgggctcaagtgatcttcctacctcatccttccaagtagttgggactgcaggtgtgtactaccatgcccagctaatttaaacagtttttgtccagttttcctcagagaactttgttctgataatttttaaattatttgtagaaacggggtctccctaatttttccaggctgttcttgaactcctgggctcaagcagtcctttgacatcagcctcccaaagtgtcgggattacaggtgtgagccactgtgcttggcatgtcagagacctttatggtagctgtgttgcagttgaaagtgccattttgtaacttgagggcttttggtttgagaattgaagggatatgaagcattaacagcaacaaaaaaatccataattaaaagagattataatgtcttttaatttttctcattaaaataaacagaggctcaagccatagaccctggaatattcagctatgacaataagcctaagagttccattgctcacttaaaatgttttgtgttttgttagttgctgctaaagatccagccaatggccgccagttcagcagccaggtaaggggagtcacctttattgttttagcaccactgtgtcctgtgtcctgggcacccacctggggtggctttgcagttcctgttatggcagaagtctcttcttttcaggtagataggcagctcctttgggtgacagtgattgtcttgcccccttcaaggtgtagctcacaaggaagtgcttgttaaatacttgagtgaatgttcggttccttttttttttttttgagatggagtcttgctctgtcacccaggctggagtgccctgggttcaagcatttctcctgtctcagcctcccgagtagctgggattataggtgcatgccacaccaagcccagctactttttgcatttttagtagagatggggtttcaccatgttggccaggctggtcttgaacttttgacctcaagtgatccacccgcctcgacctcccaaagtggtgggattacaggtgtaagccaccgtgctggccctgaatgttccgttcttatggaacatatatgtcctgaccaaattgtgttgaggggttgtcacctgaaatggagaagtaatcttgtgagatcactgctcggtctcataaacactcctcacttcttgaactcaacattttttttttgaaagacagggtctctctgtgttgtcaaagctggtctcgaactcttgggctcaagtgatcctcctgccttggcctcccaaagtgctgggattataggtgtgagctgccacacctggcaaaactcaagtttttttttttttttttttttttttttgagacggagtctctctctgtcgcccaggctggaatgcagtggcgcgatctcggctcactgcaagctccgcctcccaggttcatgccattctcctgcctcagcctcccgagtagctgggctaattttttgtatttttagtagagagggggtttcaccgtgttagccaggatgctctcgatctcctgacctcgtgatctgcctgcctcagcctcccaaagtgctgggattacaagtgtgagccactgcgcccggctaaactcaacatttttactgagttgcaagtggctctactttacttggagctggaagatgacttacagtatctttttcctcagtagatgcttcatattagatacttttcaaagtcagtagtgactaggtagtaattcactgtctctgaagtacccttatgaacaagtcatcatggtgtctgtggactgaaggatggtgaggaagggaagcctgcgtattcctaagggcaaggtccaggtctgatttatttcggggtcttatattgggctttcccgttaatagactgttcccctaaacttcagtcctttgaataccagcttcacaattcttgctctgtctacgtgtttcatgtcatctactgaatattcttctaaatattgtctcttctttttactcaaatgaagcaccttgctaaagcatcagttcatcaagataggctgggcgcagtggctcacgcctgtaatcccagcactttgagaggccgaggtgggtggatctcttgaggttaggagttcgaaactagcctggccaacacggaaactccatctctactaaaaatacaatatttagctaggcgtggtggtgtgcgcctgtaatcccagccacttgggaggctgaggcaggagaattgcttgaaccctggaggcagaggttgcagtgagccgagatcatgccactgcactccagcctgactgacagagtgagactctgtctcaaa[133 bp omitted]aacctcgtctctactaaaaatacaaaaaattagctgggcatggtggcaggcgcctgtaatcccagctactggggaggctgaggcaggagaatcacttgaacccgggaggcggaagttgcagtgagccaagattatgccactgcactctagcttgggcagcaagagccaaactccatctcaaaagataaataaataataactggtgacatgcaagttatattttttctttttttaaattttgagacaaggtctcgctcttgcccaggctggaatagtggcacgattatggctcactcagactcaacttcctgggctcaagtgatgctcccacctcagcctcctgagtagctgagactgcggggatatgtcactacacttggccaatttttatattttttgttgagacaggatcttgccatgttgctcaagctggtctcaaactcctagactcaagcattccacctgccttggcctcccaaagtgctgggattacaggaatgagccactgcacctggccaagttatttttgtaatgcacagtaaaataaaatcacaaccactaaaacaaaatagtgttggtctccatcccaccacctaacatcctcacgctggctcccctgtgggaaatcctccagtaggattgcagtaacctttgggttaaggaatgactgtcatatgagtcaaagtctgctttatcccttggctctgagagcaaagctcaggaatcatttcaggtgaaacctgtccccatttcttccttaggtctccattttgtcagcaatggagctcatctggaacctgtgtgagattctttttattgaagtggccccaggtaggcatggaatatctcaccataatctcataggtgtccccttccatcttctgctctttcctcatctttcctgtgcatggtgatgagtgttttattcctgagaatgttctttccatcattataaccacgggaagtcgttagaaaacacccaaagaaacctgaccgttttgtcaggtgctgcaaaaagaatcatgcagagtgcctccaagaaacctaaaccctgacaagtactgagaaatattaaactagtgtgtgaaagggggtgtcagtgttaacatcatggactggccaagcttaagaaagttttatgaatgtggggtaggattaggtggtgagaggcaaagtcacattgggaattctgtcatgaatcattgggacagggcaactctgtgtgttaactctgccaatgggtatgaactctgccaatgggaatttttctgttgatctttttttttttttgagacagagtttcactcttgttgcccaggctggagtgcaatggcgtgatctcagctcaccgcaacctccacctcctgggttcaagcgattctcctgcctcaacctcctgagtagctgggattacagacatgcgctgccacgcctggctaattttgtatttttagtggagatgaggtttctccatgttggtcaggctggtctcgaactcccaacctcaggtaatctgcctgcctcggtctcccaaagtgcagggattccaggtgtgagccaccgtgcccagccttctgttgatcttgaattaaactgtggtcagtatagtgtcatggcctgtatgagctctctgtggatctgctgcagcttttttgcatttcttttaaggatttatgtttgctattttccataaatgagtagtaacctctgtgtagccctagcattttattcatactctcactaaagaagtgaggaacttgaaattagagttggttgttcagaggcctcccttctccagtggatttttgaggaggttacagttggctctttgtatctgcaggttctacatcatggatacggagtgctggctgtactctgccattttatttcattttatttttattgattgattgagacaagttctcactctgtcacttaggctggagtgtggtggtacaatcacagctattgcagtctggacctcccaggctcaagcgatcctcctgtctcagcctcctgagtagctgggactacaggcacgtgccaccatgctaggctaattttttgtgtgtatatgctgggggaggggagacagggtcttgctctgtcacccatgctggagtacagtggcgtgatcacagctcagaagcctcgacttcctgggctcaagcaatcctcctgcccagcctcccaagtagctgggaccacaggcctgcaccaccacgcccggctaatttttgtattttttgtggagaggaaatttcgctatgttgcccgggctgttcttgaactcttgggctcaagcagtctgcccatcttggcctcgcaaaatgctgggattataggcgtgagccaccattcctggctcggctaattttttatttttttttgtagagatggggtctccctatgttgcccagcctagtgtcaaactcctgggctcaagcgatctgcctgcctcagcctcccaaagtgctgggattacagacatgaactaccatgcccggccatatgttttgttttgttttgttttttgagacagagtctcactccgtcacccaggctggagtgcagttgtgcgatcttggctcactgcaacctctgcctcctgggttcaagcaattctgccttagccacctgagtagctggaattacaggcatgcgccaccacgcccggctaatttttgtatttttagtagagacagggtttcaccatgttgtccaggctggtcttgaactcctgagcttagatgatccacctgccttagcctccgaaagtgctgggattccaggtgtgcaccaccagccccctggccctatgtttttatcatcattgcatacctggctgcttgctatctagtcattgttggttcctaaacggccattacttatgtagctattaagtatttgtgaagaatctggagtgtggggtagtgaggtctgcattccatgttcacccctttctggggtcagttaaagatggagctgcctggcacagaagtaatatttggtgaaagtgcatttgctttttcctagcacagtctgtcattcaggaccatgtgtgtgactgcttaaaagggataaacctatgtagtcagcttgtctgccttaaagttctctgttccttggataaaggaacttgctgcagatgaagctgaggcttttgtgtgtgatgagagtctctcctcccagctggccctctcctcctccatctccttgactgggtccggctccatgtgtgcgaggtggacagtttgtcggcagatgttctgggcagtgagaatccaagcaaacatgacagcttctggaacttggtaagacaggccgggcccccacctcccaccatgtgtcctactgtccctggtgctgccgggtgggtctgaggacacccactgagcctccagcagtaggctggcttttggagtctgttactatggagactcttttggatcttttcttccctgctctatgggagagtctaaaaccgaggtaccatgtaagaaaaataatgctttgaagacttttccagggtaaaaggaaatttgatttctttgtggatctaaggaagagaagacacaaaaaggaatacaaaaccgtttttttttttttttttttgagacagggtctcggctgggtgcggtggctcatgcctgtaattccagccagcactttgggaggccaagtcaggaatctcttgagcccaggagtttgagattagcctgggcaacaaagtgagaccctccatctcaaaacaaattaataaataaaaatataaaagagaaaagatagtccgactctgttccccaggctgttgtgcagtggcctgatcttgctcactgcaacctccgcctcctgtgcggtcctaccacctcagcctctcaagtagctgggaccacaagtgccaaccaccatgcctgggtaatgatataaaaccaattgacaggggctggggtgcatacagggttggatgtaaatgagcttgcacattactttggatcatcagtttcgaagtcagcatgtcgtatatgtgtatatggatgtattttctatgtgttaggtatttccattcacctctgctgactgacccaattgggaggtggcagggaggagatcgctagttgactgggctaatggaaagtcaactaaacttataaagcctgaaattgggaacagattgtgaggacaaaaaaaaagaaaagaaaagaaaacctggaattcggcccggcacggtggctcacaggaagtagtgggccaaatgtttgagtctctgattgattcgctaaggtttgttgttgtcgtttagagacagggtttcgctttgcggcctgggcgggagtgcagtgatgcgatcatggcacaatgcacctttgatttcctgggctcaagcaatcctcccacctcagcctcctgagtggctgggactacaggcgcacaccactacgcctggctagttttattttttgtagaggtgaggtttcactgtattacccaggctggtcttgaactcctgggctcaagcaatccttccaccttggcctcccaaagtgttggaactgcaagtgtgagccaccattcctggtcattcactgagtatttattgagtccctactatttgcaaggcaccaaggagacaccatgactaaaacaggcaaagattcctgcctttatggagtttatatcctgtgtgtggagaaagaacagcaacacataggctagtaccatgtatcctggcacatagtgaaatgctctgccaaggtgccaagaagggagggaggctgcaagtgctggaggggcatcgaagaaggcctccctcatgagagattggaggtgagacctgaaggaggtgaggagagctaggctgaagaaagcattccagatagcagggcctgtagatgctgtgttctagagccagggtggggcaggaggggctgtgctatgtaggggtaggtgggagggatgagctggggagataaagacagagcgataccaggccaggtctgagacagccccctgggctgtcactgagactttagctttttgcagcctacatagcagggtgactaacaacatggtctgtggtgccacactgcctgggttagcattccagctctgccttttactagctgtgaggtgggtttttttccttttttgagacagagtctctctctgtcacctaggctggagtgcagtggcgccatctcagctcactgcgacctctgcctccggggttcaagtgattcttctgcctcagcctcctgagtagctgggactacaggcgcgcgtcaccatgcccagctaatttttgtatttttagtagggatggggttttaccatattggccaggctggtctcaaactcctgaccttgtgattcacccaccttggcctcccaaagtgctgggattaccagcatgagccaccatgcctggcctttttttttttttttaaatacagtttcactgtgttccccaggctgcagtgcacaatcaccagtcactgtagccttggcctccaggtctccagtggtcctcctactttagcctcccaagtagctgggaccacagacatgtgttaccaccaccagctaaagtttttatttatttatttattttttgagatggcgtctttctctgttgcccaggctggagtgcagtggcgctatctcagttcactgcaacctctgcctccctggttcaagcagttctgtctcagtctaccaagtagctgggattataggtatacgccatgatgcccagctggtttttgttttgttttgttttgttttttgtatttttagtagagatggggtttcatcatgttggtcaggctggtcttgaactcctgacctcaagtgatttgcctgcctccctccatcccaccatcccaattttttttttttttttttttttagctggagtctcgctctattgcccaggctggagtgcagtggcacgatctcggctcgctgcaagctccgcctcccgggttcatgccattctcctgcctcagcctcccgagtagctgggaccacgggcgcctgccaccacgcctggctaattttttaattttgtttagtagagacgggatttcaccatgttagccaggatggtctcgatctgaccttgtgatctgcctgccttggcctcccaaagtggtgggtttacaggcgtgagccgccacgcccggctaacccaattattttttatttttatttatttattttttgaggcagagtctcactctgttgcccaggccagagtgcagtggggcgatctcagctgggattataggctctcgccatcctgcctggctcatttttttatttttagtagagatggggttttgctgttttggccaggctggtctcgaactcctgacctcaagtgatccgcctgcctcagcctcccaaagtgctgggattacaggcttgagccaccatgcccagccaaatttttttattttttgaactcctggcctcaagcagtcctgttgccttggcctcccaaagtattgggattacaggtgtgagccactgtgcccggtcactaggtgtgagatcttgagtgagctacttaacggccttaagggtcctcatctgtccagtggagataataatacctgtcccatggggctgttgtgatcattaaattagttaaaggacataaatgtgggtgaagtagttgacacggttgatgcacagtaaaagctagtcttttacttctaagccatatggggtgagggggcattggagagctgagcagaggaagcctgagatcttacttaggttcccaaaggctgtcctggctgccatgttgagactacagcaaggatggaaacaggccagtctggattctgctgtactaagccaggtaaaagatggtggtggtgtaggctagatatgtttgaagagagttgatggggtttgctgatggattgatttgatgtgggcatgcaagaaatagaagaatgtgggaggataaggttggtgaattggaggcaaactggtatttaattttagacatgtttctctcgtgtgtgtgtgtgttttgttttgtttgtttgtttgtttgttttgagacaaagtctctgttgcccatgttggagtgcagtggtcagattacagctcactgcagccttgaccgcctaagctcaggtgatcctcccctcctaagcctcccaagtagccaggactacaaaggcgtgccaccatgtccaactaatttttgtatttgtagtggagacggggttttgccatgttgtccaggctggtctcaaactcctgggcccaagcaatccaccctccttggcttcccaaagtgttgggattacaggcgtgaggcaccatgcctgtccgacatgttacgttttaagatgcctattcaagatctaagtggagatgttgactaggcacttggatatacaaagctggaattcagacaaggaagtttgggctagagaggaaaagttgggagttatcagtatgtatatgtttatatatttgtgatttttttttttttttttttttttttttttgagatagagttttgctcttgttgcccaggctggagtgcagtgccttgaatactgaattagtgaatattgaaccattgctcctaggggaaatacagggttaggttcctgcaagcctctggtcatattttgttcaaccaatcaatatataaccgatcacttgttttatgtgtgtatctgtttggagacaact[390 bp omitted]cctcccatagttcttgcacttagcaacactagaaagcacttcagtactacacgtggggacccaagaaaatgtacaaaaatgaaaaaaatgtggcactaactgcatcacgagaaagccttgtttagtgtgtgtcaagcaactcaatattcttgccactcttaattttgatttgaaagtaccacaaatactgatttgggggttacagataaattttagtgagtaggcagattcacagataaagactgaacagtgaagactatttgcattgagtgtatattttatgttatgttatgttatttttgagatggagtctcactctgtcacccaggctggggtgcagtggcgtgatcttggctcactgcaacctctgcctcccgggttcaaatgattcttgttcctcagcctcccgagtagctgggactacaggcatgcaccatcacgcccggctaatttttgtatttttagtagaaacagggtttcaccatgttgaccaggctggtcttgaactcctgacctcaggtgatccacccgtctcggcctcccaaagtgctggaattacagacgtgagccaccacgcctggcctgagtgtatttattttacatatttatatttgaactgaaacttttatgaaccattttatttaatgcattctgatattttatattatttcattttaatttttttccaaacaaaacttctcacatatttattattgaaccaacctactattgtagagcttataatcagagaaaaaccattttctcaacaaagtatgtccacctttccagatagtggtgacagtttcagcttgatgtgataagatgatagtcttacgtgtagactcatctcatgtgtaattcctggcagacccagcttggttcttctccagtccctcctcttggggttgtagctaactgtattagcaattttgttttattttgttttgttttgtttttttgagatggagtctcactctgtcatccaggctggagtgcagtggcacaatctcagctcactgcaacctccgccgcccagattcaagcgattctcctgccttagcctcccaagtagctgggactacaggcgcctgccaccacgcctggctaattttttgtatttttagtagagatggggtttcaccatgttaaccaggatggtctcgatcttctgactttgtgatctgcccgtcttggcctcccaaagtgctgggattacagctgtgagccaccacgcccagccctgtattaccagttttaatctgaatccactggtgaatgggacgattttgcttttgtttcttggccaggaattgcatgatcctggacattttgtgagaagatggtgggagaaataatcaacagcacacaccatgatggtggagaaggggtggggggaagcaggtagaggaacatgtttttctgtttctttcatttttgaaaagctggggctgagcgtggtggctcacgcctgtaatcccaacactttgggaggccgaggcggggaatcacttgaggtcaggagttcgagaccagcctggccaatatggtgaaaccccatctttactaaaaacacaaaaattagctgggcgtgatggcatgcgcctgtaatctcagctactcgggaggttgagacaggagaatcgcttgaacccgggaagtggaggttgcagtgagccgagattatgccattgcactccagcctgggcaacaagaggggaactctggaaaaaaaaaaaaaaaaggtggtcacaggctataatggactacagctggctgtttgaaaaacatagtggaggtgacaaagccatgagattggatgtgatagattacttctggagggaaagagccatcattcttcccagggcagactcaggtgcagaaagaagcctgtgtgtgaagagttaaaaagccaaagtgtggggtgaggggactggcctcctcacgcctcggcagggccaggcctcctgccaatgcttatgggcccggatctcctcccaggtgaccatcttggtgctgcagggccggctggatgaggcccgacagatgctctccaaggaagccgatgccagccccgcctctgcaggcatatgccgaatcatgggggacctgatgaggacaatgcccattcttagtgtacgtgggggtagctttgctctgctgggtcacaggagatgcgtgattcactaaatataaagggtgtggatgggatgacgtctcatggctggtctctcccttagcccgggaacacccagacactgacagagctggagctgaagtggcagcactggcacgaggaatgtgagcggtacctccaggacagcacattcgccaccagccctcacctggagtctctcttgaaggtctgggaagcagttcagattgcatccatgttggcttcctatgggggctgtggcatccagtgcagcagtggcaggagcttggtcctccttggatagggctgtctgtcgctctgccgtgatggcgagagctttcagactagttgaaatccggtgcccttagctgagagcaggagcattatggagaaggtacccctgagaggaggacagagttcagcacaaatgtctctcctcagattatgctgggagacgaagctgccttgttagagcagaaggaacttctgagtaattggtatcatttcctagtgactcggctcttgtactccaatcccacagtaaaacccattgatctgcactactatgcccaggtgagtgagctcggggtgggcaagggtgggggtaggagtcctgggggcgccctgatgggtcattctctttgaattcctccctgaggaacaggaagaccctttcctttggcccttagtgaaagaacaaggcaccttctctggggttcgttatacagcagccctgcctgccccgagtctctgcttccgtcctcaggattgagtgtctcatcacctttccacagtccagcctggacctgtttctgggaggtgagagcagcccagaacccctggacaacatcttgttggcagcctttgagtttgacatccatcaagtaatcaaagagtgcaggtaggatctctcccaccccccactgtaaccatttttaggtgtacaaatatcaccaccttgcgtttctagagtggcctgttccttccttacccttcttccctcagacctgctatcttagtccatctcacgctgatattacagaatacctgagaccagataatttataaagaaaaagattattttctcaccgttctggaggctaggaagtccaggatcagggcactggcaatgttgctggtgagggctgctctctgcttccaacatggcaccttgaacactgtgttctcatgtggtggaagggcaagaaggacaaactcccttcatcaagtcgctttataagggcacccaatcacattcatgagggaggatgtggcctaatcacctcctggcctaatcacctcttagaggccctacctcttaatactatcacattggcaaaactggggttttagaggggatcccttcaaaccatagcatctgctcccctgcttgacttgccacaggtagataatggcttttctctgggtgagcttagggacttcctggaggcttgagggctaccatatacataactgtttccatttcagggatgttcatttaaaataacatcgcgggaaactactttgacatttaaaatctagaaaaagccagcaagcctgtttcttggcacctaatggacaccttatgggatggcgtgttccaagagtctcactccagtgacgtgagctaccgaaccactgggcttcaggctgggtattattcagaatttccagccctctatccaaaagagggtgttctatgattgcactgaatctttagcaaggcaggaaagggagtgccaaacataatcaatcaaaggtaaacctttccagaactctccatatatggtaagtcagaaagaaggtccccttccttgttgtgcaccctggatggtgggcattgcactgaagacgtgctgggaagggaggaagtgggtaatggcagaagatggccttgatcaggtgtcagattcactgacctcaactggctgtttgtagatctgggcatgggaagagtttccttcgccctacctgcttttcttgttttggccaaaagaatgccagggcttcaagaaaatgat[135 bp omitted]gcaacctccacctactgggttccagcaattctactgcctcagtctcccaagtagctgggattacaggtgtccgtcaccacgcccagcaaatttttgtgtttttcaatagagacagggtttcaccatg[143 bp omitted]gctggagtgcagtggagtgatctcagctcactgcagccttgacctcctgggttcaagtgatcctcttgcctcagccttccaggtagctaggactacaagtgtgcgccaccatgcctggctaattattatttttttttttggagagatgaggtttcactatgttgcccaagctgttcttgaacttgtgagctcaagcgatctgcctgtcttggcctcccacagtgctaggattacaggcgtaagccaccatgcccggcctgaaagtcaagttttgtgtcaatattttcacaggcctgtaaacattgtgagaagtccctgcatggaagaattagtgagaataacttaaaaacacacaaacacaccatcgtttggctttgttggtgtctctgcccatagttgagtattctaaatttcctgtgttataacagtgagtgagtttcaccagggcttcctaatttataagccctgtatctggatttttaggaataaaacagatttgagcagaagaagtctgttggatgcagggagtataaaaggggaaagcatcctgctgtttccagtggcagaagagaaagagaagtaccatgaagaggggtgaacaacatcactctcgtgccggacacagacaaggaatgattaggcttgcagtcccccagtctcagcctctctccactctcacaagcaggaagggatctgagctctgttagtgggaaatcttggagtttgcatttctctgatcacgaggctacctcctatcctgttttgaaagaggaacagaaaagcagagcttgtcccaggaattgtgaaatgggctgcaatgtcttcagaggcagtagcagttttaggaagtgtgccctcctggctctggggaaaggttgaattggggtcttgtgggcacttgttttctcatgggatgtatcagtcagacccatgcacagttctgggcggcagggaagtgtgtctctttctggacttgagccagtgagctgttggcatgcctttttaaaggcattagaaaaaaggtttctttcttttttttcctttcctgttcacaccaccttcatatgaacatggagaagggaggtttctaagtgggcccctgatttactcctatgtcaataatcgtgccagaccctaaggggcagaaaaggcagccaggggatcctgactcagaggctgtagttcgtcagccctgctaaagggccaggggtttgtctctcagtgcctgggtgggcatgcttgactgctaaccccttagctgaaaggagatggcaggagtcctccacagggtcccttcttccctcctggcttacagcttcctctgaagacgggccagttccttgctgtctggcaagaggaaacagctggggtgcacttcactgggagttgggcaagatgtcggcagtttcctggtgcccttcaagtcctccaaaagtatcgagctaaaaggtgacaagtcttccttcaataaccaagaagagttccagcttaatgtctgctgaatctagaatcttctgacttgtattttggcccagcccacaatcttggatgcagggtgcagcagtgtttacaaacctcacaccccatttccagaatagcaggtagaggcactggagctttgattactccagagcccccaacaagcaagatggggcctgggtaaggagttgacagtgaccttagtacaggacaaacagctcatttggggctacagttgcttagaggggtcaccttcaccgtagctggtcttcccaactccgcagcgttctctcgttttcagcagagggctactttggagctgataattaggcctttcttgccttgaatgttaaggatgcccacctgctctgtgtctcggctgctcactcagaatccttcagagtgagagagagacagagtgagagtgggagtgtgtgcgtgtgtgatctaagacctaactgtgtggttcaggcctgctgggccctgtagagagaccgtggtggctttgtgcagcactatgtctggtctccgtcacttgagttgtgttgttagttctctgctctcagtgcttgctgccttccagccttggaggctgctggatcctttgggaagacaccgggcactgtctcagcccttccttccagttgttggtggctttcgtgcaggctaaggctttggctcccttagcctgggtcccctatagccttttcactggcttctccaatggtttcgacataaccatcagctagaaatctgggtagcaacagctgttttgggaagctgaggtgtcctttcccctggcccagcccactccctcccatttttttccccagctttattgaggtgtgattaacaaagtagtatgtatttaaggtgtacaaaattttttttttttttttggagacagagtcttgccctgtcactcaggctggagtgcagtggcacgatctcagctcactgcagcctctgcctcctgggctcaagcgatcttctgcctcagccttccgagtagctgggaccacaggcacacgccaccacgcccagctaacttttgtatttttggtggagatggggttttgccattttggccaggctggtcttgaactcctgagctcaagtgatccacccgcctcggcctttcagtgttgggattacaggaatgagccactgcacccggccaaggtgtacaacatgttttttgtttttttttttttttgagatggagtctcactttgtcgcccaggccggagtacaatggcgcgatctcgtctcactgcaagccccgcctcctaggttcacgccattctcctgcctcagcctccagagtagctgggactacaggtgtccgccacaacatccggctaattttttgtactttttgtagagatggggttt[131 bp omitted]gtgaaattaagctagtgacatctgtcacctcacatagtgacccttttggtgtgcgtgtggtgagaacattcaaaagctactttctagctgggtgtggtagcgcatgcctgtaatctcagctactgaagaggctgaggcatgagaattgcttgaacctgggaggcagaggttgcagtgagtcgagatctcaccagtgcactcccgtctgggtgacagagcaagactccacctcaactactttctgagcgatttttttttttttgagatatggttgtgctctctcacccaagttggagtgcggtggcgtgatctcggccgattgcagcctctgcttcccaggctcaagcaatactcccaccccagcttctcgagtagctgggattacaggtgtgtgccaccatgcctggctaatttttgtatttgtagagatggggttttgccatgttgcccaggctggtcttaaattcctggactcaggtgatctgcctgccttggcctcccaaagtactgggatcacgggcatgagctatcatcacgcccggccccatctctttgagggacaggacatgtggggtttcttgctcacccccactcttgtgggacgcggcctgtgccctgattttccttcttgccttggtgtctgaatctgcagcatcgccctgagcaactggtggtttgtggcccacctgacagacctgctggaccactgcaagctcctccagtcacacaacctctagtaagtggccgggaggcaccgatcctcctcttcttaccaccaggcccccgagggtggtgtgaactgaatgcctgaaagggaggttgggctaagggggccctgaacagggcaggccaggagtcttggtcttttgttatgttttattccagtttcggttccaacatgagagagttcctcctgctggagtacgcctcgggactgtttgctcatcccaggtaggaaggaccccatgggtgtgggctatgcgggtgctcttcagcatgcgggtgccattggagcttggactgttctctcccagttggctccttgaaggcttcggaagggtcagtgaaagggagctgtaggtgccagtcctcggagccatgaggcagcacctcatgtctgtcctcctcgaacctttgcagcctgtggcagctgggggtcgattactttgattactgccccgagctgggccgagtctccctggagctgcacattgagcggatacctctgaacaccgagcagaaagccctgaaggtgctgcggatctgtgagcagcggcagatgactgaacaaggtgagctggccctgctcccagcctactgtctgtgggacgcaggagtcaggggatcctgaggtcacactttatgcctaccccagccatcctcctcctcacgagccacactggagacgtggggctgtggacgccaagaggtaaactaagagatgggataattacttgggagggacaggaaagctagggatccactggaacccagacaaaatctacacgccatctggaaaggcctgagccgccccttttctcacacacttgattccacgaggtcagggctggggttggcgctgtttccctgtccaggtgggttgctattgctagctcagcctggctcaatggggaagcagtgctggaggtggctccagaaaagcagagagagtggaatgaggatgaccaagtctgccccttcatttctcccctcactgttgagtaatgtaaacatgagttattaccctgcagagaggcagttgcatgttcacgaccatttctgaaagcatatggtattcacgatccacaggaagatgtgatttgaggcatctggagaggtaatagaagagctgacacgtagggagaaacacgtagggagaaaaaaaatagaagagctgacatgtagggagcaacgttttgctccccttgaagccacacacactcatagagccagtcttgccgtgatgggcacttacactcttagcagatcccagacactgttaatcagccgagtttccagctctgccgatccagctgcatttagagcccaaagagtggctctgcggtggagtgaggctgtgaggccactccggtccccacagggctcaggaatggagtgatttgtggagtgaaagccgtttaccttttcttttcccctgcaaagttcgcagcatttgtaagatcttagccatgaaagccgtccgcaacaatcgcctgggttctgccctctcttggagcatccgtgctaaggatgccgcctttgccacgctcgtgtcagacaggtgggtgccgctagtgttggcttcccagggactgggtggttgaggtgggcctgagactgctgctctgatctctgggccgggccctgcaggttcctcagggattactgtgagcgaggctgcttttctgatttggatctcattgacaacctggggccagccatgatgctcagtgaccgactgacattcctgggtgagtctctgggttttgtgccctgtgctttgggcacaagtgggtagttggggaggttggagggatcacgtcagacttctcccagcgcttccttcatgtattcccattgcatcagtggtcccagaaacatcctccgtcatgtccaggatcatgagtttggctgtcacatctccttagtgcctccatgtttgtttgtttgtttgtttgtttttctttctttctctctttctttctctttctctttctctttctttctttcttcttttcttttattttttctttttttttttttttgagacagaatcttactcgctctgtggcccaggctgccaggctcactgcaacctccacctcctgacttcaagcaattctcgtgcctcagcctcccaagtagctgggattacaggcacgcggaaccacacctggctaatttttgtattttatttatttattttttggggacagagtctcactctgtcacccgggctggagtgcagtggcgtgatctcggctcactgcaacccccgcctcccgggtccaagcaattctcctgcctcagcctcccaagtagctgggactacaggcgcacgccaccacacccagctaattttttgtatttttagtagagatggggtt[268 bp omitted]tttttttgagacggagtctcactctgtcgcccacgctggagtgcagtggtacaatcttggctcactgcaacctccacctcccgggttcaagccattcttcctcctcagcctcctgagtagctgggactacaggtgcatgccaccatacccggctaatttttgtatttttagtagaaatggggtttcaccatgttggccaggttggtctcaaactcctgacctcaggtgatccacctgactcggcctcccaaagtgctggggttacaggcataggcatgagccaccacgcctggcctagtcaatctcttttaatccatgactcttgttatgtattttgactctgatgtttccccagatttggctcttcggagttcttccaagtctgttttgaatgctcttggtctgcatctcattgggacctatgagtttggagacagaaaaaaatctcctgctttgtggagtggctggtctgaggtttttcttctcctgtttagggccagggtgacttttgtaggtgtcacttgggcaatttgggggaatatgcaggttactcagtgctcttgtttcgccataggaaagtatcgcgagttccaccgtatgtacggggagaagcgttttgccgacgcagcttctctccttctgtccttgatgacgtctcggattgcccctcggtctttctggatgactctgctgacagacgccttgccccttttggaacagaaacaggtgaaggttgcagcagcagtggttttctttgcttgtcagtccctgctagagcttagttgtatagctgttgccgatgtgcgtgtttcctcctttgtcgttctgcctgtgcgcgtgtattccccttagcgccctctctgggattccagactcacacaggaaacaaacactgcttgatttgaaatgaggtattcgtatacaaagcacactattgcgaagggtatgaaaggaagaacgtccgaacatgggcccctgccccaaccaatgcaggccagggctgggggcagccaagcaaggcaggctctcttccctaggtgattttctcagcagaacagacttatgagttgatgcggtgtctggaggacttgacgtcaagaagacctgtgcatggagaatctgataccgagcagctccaggtcattttcacttttgggttgatggttccacatggaggtgggaaaaggctccctctatctcaggcttccccttccctccagaaacactggctcctatggacacatgtgcctctgttccccttaacctgtgtaattcacacaccaccttcttttaggagaaaatcagggattctagtgttctcatctctacattttgttctttgctgttcatcatttccagtatggccctttggtattgctttcttttacatcgataatttgctggaagctactatgaatgttaagtgccctctacctttggattagctagacccttcgggagtgtgaaagggctccttcctgctcttagctcatgctggcgctctctgctttgcaggatgatgacatagagaccaccaaggtggaaatgctgagactttctctggcacgaaatcttgctcgggcaattataagagaaggctcactggaaggttcctgagaactgcttcaatgtggtatctttgtatggcaatgtatatagatttttttaaaagaataaatgttgttttgcaaatgtaggttcttagagtccacccagggaattttttatctgtctagtctgaacctgaggtggtaagagattaaaaaatgcttgttttatgttcttttttttttgagacggagtcttgcactgttgcctggcctggagtgcaatggcacgatctcagctcactgcaacctccgcctccagggttcacgtgattctcctgcctcagcctcccaagtagctgggattataagtgcacaccatacccagctaatttttttgtatttttagtagagatggggtttcactgtgttggccagactgatctcaaactcctgaccttgtgatctgcccgccttggcctctcacagtgctgggattacaggcgtgaaccaccacacccggccttgttttatgttctgatacgcaactgtcttcctgtgcctccttagataagaaatcaccccccaggtcgggtgcagtggctcacgtcctgtaatcccagcactttgggaggatccctcaaccccaggagtttgagaccaacctgggcaacatagggagactccatctctgtttaaaaaaaaaaaaaaaaaaaaccccaaagttgtggtgactgcagtgtcttggaagtctgaacaagaacgcttggtggtatacttgtgcttctgaaatcttgcctcacctcttctggaacacttaacattttggttatttagttcccttaaaatataagcgtacaggaacccgcacttttaacaaaaaccttgggcagttctatcataggctgtcctcatgtatatctagaattcataggtggtaccttttcctccatcagggtgaatggcgtctatactaggaagattccaagtacagtgaaaatggttttatttaacatgcagcaaaacaagggcagcagagctgggatatccagtacagccatttgccacgaagcactgacctcaacagtaacgagtaacactcaaataactgtaatgtctagagcataacacaaagttccatttccacatagtaattccacagacattcccagggctgcagcagccagtctctggaaagctcttggatttattccttaagtagtgaaaaatgattcacttttgacttgtcctcttctaatgaagcagtgaaacctgcttgctaaagacagcgaggggcagggaagggatatgacctcttcccatagtaaggaataaggaagcctggcaaggggcagggaggaaccagggaacatggtctgtgccaccttcctttccccagagatgtccgattgctgagcttgttcacctgggctccgcaagcttcccccgtgtctatggcagctggtgattttttttttgtgacggaggcttggagtacatgtcccaggatcacatccagcagctagagtggctgggacaagctggcgggggccaagcactgttgaagcaatagggtctggtgactcagctcaagtgtggcccgatctcatcacctccagacccaacatctcgctgacagtgcccctcagtagctggggaacagttgaggtttctgggcagcacattaggacatatgtctagtgtaacatttgtgatcctgaggcctcctgtgtccagccacaggtgccacaccacatgccatctggtgagaggagagggaggccaaagcagtaggatgtagagtggcggtagattccaaggggaggatagcagtttatttcatgccaagcaagaggtagtcagtaggatggcctgtccccacggctggaggcacgcttttcccagaaagctgagtacctgcttctggagaaggggaaatactggctctcttcattttccttcctatccctagttgggcctgtcatgaggccaaattccatgtcctgccaagatgtccataggacacagcctgccactgccagggacaagcacacaactcatcactccgtggccattccaggacgatgctgtccaccagaggcagggctggggactttgcagtatgccagttccttattctgggccaggcaccttcctgggccacctccctggggatggcagcaggagctggttggcgggggaagcatggaattgcaacagggctgcagccccttgggccgtgcatctgtcaggtgtgaggatgtggctcttgtggggaatgacccatgacagtctctctttagagactcccaccccccaccccccaccccagtggcttcagtgaatgccagtagaaggaagcaaacacctacgccaagcctgggggtccatgttcccgggacagcagtgaagtcaggggccactccgcacccctgacagcatatggccacttcaagtcacacaggtagataaaaacaggtccttttaggggccaaaggagaggttatcacagcagcagtttggttctcagcagaaatgcccagggcccctgttccacatcaaagctacaagcactgttgtcagggcatggagagtgacgggaccagagccctcctcgtctcagggcagcctgcctggcttcaaggtggagatcacagcgtcctctggggtcataggttcccccactgttccacaggagggaactggtccacctcgcccacctctgtgctcagctgctcccccagggcgaaggtcagcttataccgaagccgcaccttctcctgtgacagagggcagcaagtgagatccagcccaggcggccccttggcaggacgccctctattctgctaccctctctgtgctagaggaatggtcccttttccccgcaacccccaaccatgctcagacacttaacctaaggcagcaaagggatgtgtcaatcctacagtcaaaacacttccagctgggaggtggtgggcctgacgtcctaatctggggcagctggggcctcaggctgggacccctgggttctttgctgctcaccttcagtggattggccagcaacatgacctgggtgatggctgcaggtggctggatggggctaaatggagagagttctgtcccagaaggtggctgcaacttcactttcattgactaaagagagagaaactcctttgaagagaactggtaggtgcccccagatggaacctgcagtgcacacacacactgccacctgctggctgcaaaggcctctacacaacagggtcaagataaggccgttttggccccagggagacactggtaccttgggcactgcagcctgcagcacgatgctcttgacaggtaagggagccgtgttcagcatggacaccaccaccaccagcacgtcaggtcgtcctgggggacactccttggcaaagtggaagaggatgcggaagccgtttttatcgtaggctgtcacaggaagggcactgcctgtaagaacgtgacgtgagtgtgggaggagcagcaccagagacacccaacagagccccggcggtgaggagaaaagggctactccgtggtcatgatgagtccagtgcttcctaacggaatctgggagaggcgctcagtgaggagcttaagactgagaatgcaggcagggaggcctgcctggctttaagggaccccctgcaaagagtgcctggatccatccctgtcgcatgtcctacagctccgtggctataggccccaccgccccacccacctcaatcctccaacacctactaggcttgatcgattccaggggcacgtggatgctggccagggagagctcaggccccttcggggggctgccctgggactggaaactcagtggctggaagagcgggctgccgggccccgtggagaagggcaggaggggcctggctggggtggtggtggggatgagaggggaggtagtgggtttcaccaagcccgaggtcctgggaggtgggaaggatggaaagcacgtcagagagccagccagagctgcaggactctcacccaaggcccctgaccatgctcttacccaggcccaccccttgccttccagcctgactgatgggactacaaggcacccccaccccttcaaagttagctctggttctgacacattcaggcccaaccctcagcaaccccacatctcctcccactcattacactttggcctcttctagaagctgatcgagggcatccaggtggtgcagcgcgctgttgcccaacgccaagccatggtgcccagggactgcgggctcaacttttggggccaaggctggggccactccagtagaaaacaaggaggagcccgcactgggggcaggaacactggctgggaccacaggagctgggaagggaggcggcagtggagcttgggagctgcttgaggagggggctgagggctggagcagaggagcatcggaggcgccacaggcagcggtccccggcctggggctgaagaagtccaggtcggactgttccctctatgaacaacagaaagggtggtgagccgagggcgggtggggagggcctgccgctggaacggggcgcagccctccaaggactgcacggaagacagccccggaggcactcattgttccccgctgcagctggcacgctctggagggaaggacagctaactgcagcccaggagacatgacgctggaaagtggaggtccttggcacagtagtgctgtcaccgatcctgtgcccctacctggagcaggtgccactggctgttcccagctgactctttgggaggaacattaggggctgggtcggcgaggcctgacaatagagaagaaaacaggatgagaagaggctctgagctaggcagccctagccccgccttgcctgaggaggggtcaggtgacaagtgacatcaatgggtgaaggcgccgggagaagctgttctgcaggcagcctccagaggggaatggagcgctccagtccatgatgcagaagcggggggcctgtggggcggggtgcagggcaggaggcagagtccaccgggaggatggccctggggccctcagggtcgctgaacttcactgagtacctccaactcagggttctttgcccaccccaacagtcacactggggccccgctcagggctcctaattccacacacccttcctcccagagccctgtcaggggatgcccctgacgccccctgtgggccgcacccaagcagagtagctcctcgtccagccaggagagggcgttgcttgtgctgctgggccccagggtggcctcggcctggctagaggagcggctccgtggaggtcctgaggcctggggtggtggagggaggattgggatgcctgaggagggtggagtaggtgctggggccaacacggaggacaaactgttggtcgtgtccagctccgcaaggtcgatgagcgtgccttggttactgcactgactgtttcctggatgggtcaacagagcagaacaggaataattaggggtcttctagtggctgtgtggcaggaggcagcaccctaggcacagaggtcactgctacagcctctggcctaatccaacggcatctctgccaggggatgctgcaaagcaagcccgagaaagcaggtggggaaattcctacccacatctccaggcctccgggaagccggaggattgcttggaatggcaaagaactcccttgggccttgtgcaacaccaccacgctggccagcctacacccgcagcttcatgataggggcctgaggctggtctggaggagcctagagttggggaccagagcatctcaccttccgagtcaggcagggttaaggtagccacctcgccattgatgacctgcccttcaataattgttttgtaagagttgatgacccgggagaggttgtcactggcttgcaggatgtcccctggagcaggaaagagagacttctcactcctgttgtgacagttcccacccacatatccaaatgcctggcttatccctgaccgtcgctctttcactcacccaaactgttatcattgtcctcagtctcactggcgagtttaaataaagtccgcctcttgttctcacactgatcaaacagctcctgaaagagactcggacataaaaatcaaaccacaaaggcccttagagatcatctgattcattcagggttcatgcccagaaaatgaccgggatatgccaattgccacggtcaattaccagcaaagctgggatcacagcgcacgtcttcttgccaccagccaccaccaccacaccacatcacccaggatgtttgtctaggtagcagtcaccaggatgggtcaggggaagtcagtcccctcctgccttccaggctggcatgttcctcagaactcaaaatatccacccaaccatggcctgcaccacatgggcatcagggttacaaggaagcctctctgtcttgatgtccccaaggtagtaaggaaagggagagagcaggggtgagcaccgagagtgtggtctctggagtcagactcaggtttccatctggcccttacaccctggacaagtcagctgatcccaggaggcaaatggggacgccaccctctactgacgtggctgctgtgcagatgagtaaggtcatgaatacactgccaagtgcacagcccgtgtctctgacaaggcacgtgctcagcaaatgctggctgagctcctgaagggcagcgcagccccgggaggcagcctttgccgtcggcggtcccaccttcatcagctctctgtccccgtccgaagagtcctcctggctgtaatgaagcagcatctcactgagcagtctcacgttgttgttaacttcctctaacgtgtgcagacgcttggtcaccttctggatccgtgcctcgtcctgccccagtgaagaagttcaagagaaagagagcgtcacttgactgtctttccacttccaccaggtcacaccttaccccacaacacaagtacagacgctcggaagctcctttcagtgtggggtgcctggggcccagtctatacttctgctttcacaacactgctcccaacccactcctctcttccgtgctcccgcggaagctattgtgctcctcctcccactctcagccaccggggcacaggtagggcagctggcagcaggggagaacaaaacaggcccgtgtccggggcaaagcggcttctgctgtgtggccatgggctcctccaccccgtgcctgaaggaccggggcccactcacttccttcaccatggacttgatgagcttgttggcctcctgcaggtcatctgggtttttgcttttcagcagcttggctaaaagctgagagaggaggaaatcagaggtgaagggaagaggcagcacccgtaccccagggaaaccccagaggctccccgcagcacagtgcaaaccacattcccctgctgccacccactctcgtatgagaaaatcccaggcccagggtgtcctttaccttggacttctcctcatcatcaaaaacagggtttttgggacgaggtggtggagaggggatcagcgtcctatccacaggaattggtgggtcagactgcactatgcctgaaaggggacatggcagcacgtgcactcaggctgtggttgccttgtcacccctcctcatacaccaagggccacgtccctgtgatcaagacctgcaaagggtagcagggtggagggcaggctgctacaccttatcccatccaactccgactcagccttgcctggggacaaatgctgttctcttcaggagggactctggggatcccaaaccttcccttctctccttgcctgggccagccttcgagggctgcctggaggctgcgggcaggcagacacgtaccctgtctcttcagcatgtggtaggcgtctttgatctttgcttcttctggcagggccatggtccagctgtacagcagctcaataaccttggtcttcactttctcagacaccctgtcccccaggtactacatggcaaaagaaaatgaggacctagtaagtgcagttcggaggcagagaaagtgtaaggctccctccacagcaatggcgtggctgctcagcagctatggtcctactcaaaatctgcaggtgtccaagtgtgtgtgagacagcgtggggaggggaacgactccctgtggtgtggctgtgtccatctggatacagtctgtggataggcagggggccaggaggtcatcacctcctgtccaggaagtgtcctgtaagtgtattcatgaccttactcatctgcacagcagccacgtcagtaggggtggcgtccccatttgccgcctgggatcatctaacttgcccagggtgtaagggccggatggaaacctgagtctgacaccagagaccatgccctcggtgctcacccctgctctctgcctttccttactaccttggggacatcaagacagagaggcttccttgtgaccctgatgcccatgtggtgcaggccatggttgggtggatattttgagttctgaggaaagtgcattttcacgcacaagttgccagaaacacaactgcattttatcttgggggtgtccatgagaatgtctttagcatggtaaagtattccctctgctttaagtgggggcccagagctgcgccacaccagcgtgcaacagaacacggccagctgagcatcggagcaatgacggaggccagctccccgtatccacgtgacacaggccaagaaaacccacaaaacccacaactgccatgtgccaggtgcctagagtcccacactacatgggccctcaccctggacaaacacacagccactaccacatcacctgtcagatttgggctgagggcgcttcagaaaaagctgccggtccctgtggcctgtttggtcatcccgttacctccagggcctagctctctaaggacaagacacaaataatctcagctccctggagatgttggatgggcagtgaaagccagtatgatgggagatgggaatgaacacaaaagaagtccctaaaagcgaggaatctgccgctgactgacctttggagagacgactttgattaactcattcaaaaagcggaacttccccacttcgttatgaaatctcctcccacagttcttcatgcatgcctccagcacctgtagccgcacagaggagaggcgctcagtgagggcgtgctcggggctggaacctggcactggcaagatccctggcacccagagagtactgaataaacacgcccacaggaaggagctcatcacgaaaagcagtgtgcactgcccggggacagtgtaattaagcaacgagatcactcacagaccatgtccctccaactgcaaacctctgctggggaagctgggcagggactaaagcaagaaaccccgagaccccgaccccaagaaggcctggatgccagtcctggaaggtgccttccttaaagattctggcctcgtgttttacaatgagggaggtgaggtccagggacaaagtttctctgacttggtgtcctgggttttttccacaagctcaccaacaattgtgcagggaatgggagggatgtttaaatcctattatctgtgagaaagatgacaggatatttctcctccctccgcttatctccctaactcacgctttggctttcctgtgctgcctgtggtccctggcactgcggtttctaagggggagtgcactgtccaggctctctttcttggcttctgcattttaaagcaaggtttctcaggtgaggcctggctgacattttgggctggtcattcttcgttgtggggggccactctgcactttatagggtgtcgaacagcatccctggcctctgcctacttgatgccaggaggacccccaccccgatgtgtgacaactaaaaatgtttccagacactgccaaatgttccctggagggccctgttgagaatcactgggttttgttacgttttttttttgttttttgacacagaatctcgctatgttggtcaggctagagtgcaacggtgtgatcaccactcactttcgcctcaacttcccaggctcaagccatccttcaacctcagcctcccgaggagctgggaccacaggtgtgtgccaccgtgcctggctgatttttttattttttgtagagacaatgtctcactacgttgcctaggctggtcttgaattcccttaagcgatcctcccggcctaggccccacagggtgctgggactataggtacaagccaccgtgccctgctgagaatcactgttttaaggaattcgttctacagcaaatatgactgaggggtgcatgtgaaccagatgatatttcctcttttcgctttccaggacctgaatgcagtcaggctagagccccggattcctcagatctcggctgctctttgttttcggagcatgtggaggcactgagggccaggcaccattccacaccttaaattccctcagtctgaacagacaccaggatctgccctaggggcctcagccatcagtgcgacaccttcgctagtgactggcattgtttaactacagaatgaactggaccgacccctcttttcttcagctggccagctctgaactatcaacacagccctgtcagcatctcttcaccaagccttctcttgcgccacatggggctcagggccctgactctgggctgctttccttagcccctctgcctcacacactaaccatgtggccatgctggcagggacggcactgcagtcacctctgaggcctcagggcctggcacaatgcacacagatttgtggaacagctggctgaacagattcgagatctatctagtctgtatcaaggactttctgttggcttttggcaggagccctaagaaccgctatggggacacgaggaatggcgtgggcaggtgaagggctgcggtttccacctccggagagtgaaggacctaccgtcagggcctggagcgcctcccattcctgtggggactggatcttgtgggccagcagtcggacggcgatctgtggcctgggggacaagcagaacacactccagtgcactaagcctggggctacctggctggccctccttggccatggttgttccccttcccagtccgctccctctcagctgcccccacagtgctgagactcacccttccagctccttgttgatctgatcacagaagccaattatgtattcccagtcctcctggcggttggaaggattggtggctttatcttgcaacacaacaaagaagaggacaagtgttaggaagagcaatgaggatgcaatggaaggttttcttcgcaagttttaagcactaagagtttgctttcaactttactctctaatagagaagcctcagtagaacagtcagtagcaaggagacagaaaaaaaaaaaattcagtcggagagcaaatacaaatactgctttctgtccagtattttgaaagtcacaaataaaagagaaaacaaattctgtctcatgaagcttagagtggaatcaaggtcaaaaggacaaacacaaataattaaaatattcccaaaaaaatgcctacatgaaacatgtaaagataataaagggaactccagctatataaaaatgagctcagtgttaagcaagtggagatggtcaagaagggtttttggggaaactgaaatcagactgaactagataaaaaaatacatatttgtaaccacaaattttttttttttttttgacatggagtctcgctcttgttgcccaggctgtagtacagtggcacgatctcggctcattgcagcctctgcctcccgggttcaagtgattctcctgcctcagcctcccaagtagctgggactacaggtgcataccaccatgcccaactaattttgtatttttggtagagacggggtttctccat[133 bp omitted]gacctagccttccataatgctttaagtgtttttgaaattgcacataatgctcatcattgtcaagccaacaacatttacttagcccctactaagccctggtcaccgtgcaacttgcctgggattgcagcttgagtatctagcacccccaggctctaatggccttccatggtcaagcacaaacacaagtactagagttctcagagggcccctgggatttaaaatccaggcaccaaatgcaaagttctgatatttggcatgggctctcctcagttaccttcccaaacctgtgattacactgaagagcccagctgagggtggttacatgggttcccatctctgattcaggtccagagcctccctcttcagaaagcactctccagctgtttgctaaatttagggctttgggttctgaagacaaatggaaggctgaagacgcacaccccttaaaacactcctgctccctccccagatctctatgagggcccaaagcagggtgtcagagcccctcccgacaaggccctctctgtcattactttctgaattctgatttctc[181 bp omitted]caaggtggcgggcgcctgtagtcccagctactcggtaggctgaggcaggagaatggcgcgaacccggggggtggagtctgcagtgagctgagatcgcaccactgcattccagcctgggcgacagcgagactccgtctcaaaaaaaaaaaaaaaaaaaaaaaaaatcaccagctgggccgggtgcagtggctcacgcctgtaatcccaacactttgggaggccgaggcaggcggatcacctgaggtcaggagttcaagaccagcctgaccaacatggagaaaccccatcactactaaaaatacagaattagctgggcatggtggcacatgcctgtagtcccagctactcaggaggctgaggcaggaaaatcgcttgaacctgggaggcagaggttgccttgagccgagatcgtgccattgcactccagcctgggcaacaagtgaaaactctgtctaaaaaaaaaacaaaaacaaaaacaaaaaaaacaaaacaaaaaaaaaaaaactcaccagctggatgaacacatcataacagagactccagctccttcactggcaacagggctgcagggatctgagtagcgacagctgccaggcagagggaaggcccgtggcacccagtgtatcaccctgcttcccaggtcggggctcggcctccccggcagtgtttctgttgtggctgcaaggggaagattctgatggtttaggttcatatttatttatttatttattttgagattgagtctcgctgtgtcacccaggctggagtgcagtggcgcgatctaggctcactgcaacctccacctcccaggttcgagctattctcctgcctcagcctcccgagtagctgggattataggcatgcgccactatgcctggctactttttgtatttttagtagagatggggtttcgccatggtggccaggcctcctgacctcaggtaaggaggtcaagaccagccctggcctcccaaagtgctgggattacaggcgggagccaccgcaccccgcctaggttcctctttagaagaaaaagaaggtgtctgtcttcaatcttgaaagagaattaacaggtccttcaaaatctggagcttgaaaggaggggagttaaatgtaatcaagggtagccatttggaaagaaatgtctggcaatcctgcattactgtatggtagcctaccagctatcacattccaaatgccaagtctctcccaccaattgtctgaaatttcctcaggcattagcgtagctctgttactaattcctatcaggtgcttaaagttctcacataacaccaaaagtctacagggtacaaaaattgaatggtctgagaagcaatccccatcccccagggctattattttgggaacagtcatacaccttgtgacagaagaaaaactggcccactcactttcactttttgcacggggaaaagcatcttctgagtacagagtaaaatgtggatccccccaacccccgaagcaactggtattcaccatacgttatcttcttcccaagtctattagacttccaacagcatttctacttccaagaacactcctgcccacttttcacttgtattaatttctctagaatctcactttcttccaccttgatagacctttttatggcaaatccacagggagctctttgcctactcacgggcacaaaaagccctagtttctgcaatggtcagttccatgtctatctcctccagctctctgggcagctcagaaagcagagctcacccgcccacaggaacgggaaggaacctctggggataattctgggtgacttgatctttccatctgcctactgcctccccagcagatgcacacagcctcccacccactcaacatttccttcacctggcatagaggtgacacccgagcttcccctatagaccttgccttcccgaaccgcccctccgggctctgctctgactcatggtttctgtctattttcgagtctctgttgaaagcctcatctgtttctgtgtctctggatttcctgctttcatttttcagcttcactccatcgctagcctactctcgtgggacttaaaacgtcatgtggggatggaaacagcagcattgggtaccccattccagcacggctcaaacattccagagaaaacaagatctacatagcaggctggatgcggtggctcacgcccgtaatctcagcactttgggaggccaaggcaggtggatcatttgaggtcaggagttcaagaccagcctgttcaacatggtgaaatcctgtctctactaaaaatactaaaattagctaggcacggtagcacacacctgtaatctcagctacttgaaggctgaggctggagaactgcttgaacccaggaggcagaggttgcagtgagccatgattgtaccactgcactccagcctgggcaacagagtgagact[144 bp omitted]tggtgaaaccccatctctactaaaaacacaaaattagctgggcatggttccgcgcacctgtgatcccagctactcaggaggctaaggcaggagaaccacttgaacccaggaggcagaggctgcagtgagctgagatcaggccattgcactccagcctgggccacagagtgaggctccatctccaaaaagaaaaatctacgtaacaaatgacttacaaacaagcagaagcaagaacatgggctggaaagggaataaaggtcaaccttcactagggtcctgaatggaaacacaaacttagtcaatcaccaagtctttgttaagcacccgcagacaatgaagtaaacagcatgtcagcatgccagaccctggagggactacagaaaaagttccagacacagattttaccctcaaggaggctgtgctctcctggttcaatacatgaaaaaaaaaaaaaatcagttcaaaaaacaagacagtagataattgggctaatttggtacagaaatgagtgtaaaaacaaatgtatggcccaggcacggtggctcacacccgcaatcccagcattttgagaggctgaggtgggtggatcgcgaggtcaggagttcaagaccagcctggctaagatagtgaaaccctgtctctactaaaactacaaaaattagccaggcgaagtggcaggcgcctgtaatcccagctacttgggaggctgaggcaggagaatcgctttaacccaggcggcagaggttgcaatgagctgagattgtgccactgcactctagcctgggcgactagagtgagactccttctcaaaaaaaaaaaaaaaaaaaaaagcatcacttctttttcctgacttccccatttctttttcttcttcctttttttttcttttttgagacagggtctcactctgtcactcaggcaagagtgcagtggtgcgatcatggcttcactgtagcctcaacttcccaggctcagatgattcttctacctcagcctagctgggaccacagacactcacatcacacctagctaattttttgtacttttggtagagacagaattttgccatgttgctcaggctggtcttgaactcctaggctcaagcaatctgcctgcctttaactcccaaggtgctaggattacaggtgtgagtcccagtgcctggcgtctttcgtttttttttttcttttttgttgtttgagacggggtctcactctgtcacccaggttggagtgcagtggctcttacagctcactgcagtctctgcctcccaggctcaagtgatcctcccacctcaacctcctgagtagctgggaccacccacaggcgtgtgcttgttctttttttagagatgggggtctcactctattgccccgggctgcagtaggcgatcatggctcactgtagcctccaactcctgggctcaggcgatgctcccacctcagcctcctgagtagctgggaccacaggaatgagccactgcatgtggtctattaagtcactattcctataaatgctgcaccttccaaaagtcccctattcccccacctcttttttgactccttcttccctctctcctcatccattcctctcagtcttgtggtcctttccttctcaatgtcttcttaaatcccttccttccttatccctaccctccactccttctcacctgcttctagaacttctgttctaatccatcctaatcctatgtaaagtccctattgtcaggcctctgagcccaagccaagccatggcatcccctatgacttgcacgtatacatccagatggcctgaagtaactgaagatccacaaaagatgtaaaaatagccttacctgatgacattccagcattgtgatttgtttctgccccaccctaactgatcaatgtactttgtaatctcccccacccttaagaaggttcttcgtaattctccccacccttgagaatgtactttgtgagatccatccctgcccgcaaaacattgctcttaacttcaccgcctatcccaaaacctataagaactaatgataatccaccacaccatttgctgactctcttttcggactcagcccgcctgcatccaggtgaaataaacagccatgttgctcacacaaagcctgtttggtggtctcttcacatggacgcgcatgaaatttggtgccatgactcggatcgcgggacctcccttgggagatcaatcccctgtcctcctgttctttgctccgtgaaaaagatccacctacgacctcaggtcctcagacccaccagcccaaggaacatctcaccaattttaaatcaggtaggcggcctcttcttactctcttctccaacctctctcactatccctcaaccactttctcctttccactcttcaatctctcccttctcttaatttcaattcctttcattttctggtagagacaaacgagacacgttttatccgtggacccaaaactctggcgctggtcacagactgggaaggcagcctttccttggtgtttaatcattgcagggacacctctctgattattcactcacgtttcaaaggtgtcagaccactcagggacgcctgccttggtccttcacccttagcggcaagtcctgcttttctgggggaggggcaagtaccacaaccccttctctccgtgtctctaccccttctctgcatttctgggggaggggcaagtacccctcaaccccttctccttcacccttagcggtaagtcccgcttttctagggggcaagaacccccaatcccttatttccgcaccccgacctcttatctgtgtgccccaatcccttatttccacaccctgacccctttcctgcttttctggagggtaagaaccctcgaaccccttccctccgtgtctctactctctcttttctctgggcttgcctcctttactatgggcaaccttccagcctccattcctccttctcccttagcctgtgttctcaagaacttaaaacctcgtcaactcgcacctgacctaaaacctaaatgccttattttcttctgcaacaccgcttggccccagtacaaacttgacaatggctctaaatggccagaaaacggcactttcgatttctccatcctataagacctaaataatttttgtcaaaaaatgggcaaatggtctgaggtgcctcacatccaggcatttttcacacttcgttccctctcaagtctctgttcccaatgcgattcctcccaaatcctccttctttccctcccgcctgtcccctcagtcccaaccccaagtgtcgctgggtctttccagtcttttctacagacccatctgacctttccccttctcctcaggctgctcgtcgccaggccatctaggtcccaattcttcctcagcctctgctcctccaccctagaatccttttatcacctcccctcctcacacctggtccagcttacagtttcgttcagtgactggccctcccccacctgcccagcaatttactcttaaaaaggtggctggagctaaaggcatagtcaaggttaatgctcctttttctttatcccaaatcagaagcgtttaggctctttttcatcaaatataaaaatccagcccagttcatggctcgttcggcagcaaccctgagacgctttacagccctagaccctaagaggtcaaagggccgtcttattctcaatatacgttttattacccaatctgctcccgacattaaataaaactccaaaaattaaattccggccctcaaaccccacaacaggacttaattaacctcgccttcaaggtgtacaataatagagtagaggcagccaagtaacaacatatttctgagttgcaattccttacctccactgtgagacaaaccccagctacatctccagcacacaagaacttccaaacgcctaaaccgcagtggccaggcattcctccataactgcctcccccaggagcttgctacaagtgccagaaatctggccaccgagccaaggaatgcccgcagcccgggattcctcctaagcgagtcccatctgtgtgggaccccactgaaaattggactgttcaactcacctgacagccactcccagagcccctggaactctggcccaaggctctctgactccttcccagatcttctcggcttaacggctgaagactgacgctgcccgatcgcctcggaagccccatagaccatcacagatgccgagctttaggtaactctcacagtggagagtaagtccgtcctcttcttaatcaatacggaggctacccactccacattaccttcttttcaagggcctgtttcccttgcctccataactgttgtgggtattgacagccaggcttctaaacctcttaaaactccccaactctggtgccaacttagacaatactcttttaagcactcgtttttagttatccccacctgcccagttcccttattaggccgagacactttaactaaattatctgcttccctgactattcctgggttacagctacatctcattgctgccctttccaatccaaagcctcctttgcgtcctcctcttgtattcccccccaccttaacccacaagtataagatacctctactccctccttggcgaccgatcatgcaccccttaccatctcattaaaacctaatcacccttaccccgctcaatgccaatatcccatcccacagtatgctttgaaaggagtaaagcctgttatcacatgcctgctacagcatggccttttaaagcctataaactctccttacaattcccccattttacctgtcctaaaaccagacaagccttacaagttagttcaggatctatgccttatcaaccaaattgttttgcctatccaccccatggtaccaaaccatatactctcctatcctcaatacctccctccacaatccattattctgttctggatctcaaacatgctttctttacaattcctttgcacccgtcatcccagcctctctttgctttcacttggactgaccctgacatccattaggctcagcaaattacctgggctgtactgctgcaaggcttcacagacagcccccattacttcagtcaagcccaaatttcatcctcatctgttacctatctcggcataattctcatgaaaacacacgtgctctccctgctgatcgtgtccgattaatctcccaaacctcaatcccttacaaaacaacaactcctttccttcctaggcatggttagtgtgtcagaattcttacacaagagccaggaccgcaccctgtagtctttctgcccaaacaacttgaccttactgttttagcctagccctcatgtctgcttgcagtggctgccgctgctttaatacttttagaggccctaaaaataacaaactatgctcaactcactctctacatttctcataacttccaatattattttcttcctcatacctgatgcatatactttctgctccccggctccttcagctgtactcactctttgttaagtcccacaattaccactgttcctggcccggacctcaatctggcctcccacattattcctgataccacacctgacccccatgactgtatctctctgatccacctgacattcaccccatttccccatatttccttctttcctgttcctcaccctgatcacgcttgatttattgatggcagttccagcaggcctaatcgccacacagcagcaaaggcaggctatgctatagtacaagccactagcccgcctcttagaacctcatttcctttccattgtggaaatctatcctcaaggaaataacttctcagtgttccatctgctattctactactcctcagggattattcaggccccctcccttccctacacatcaagcttgaagatttgcccccacccaggactggcaaattagctttactcaacatgccccgagtcagataactaaaatacctcttagtctaagtagacactttcactaggtaagtagaggcctttcctacagggtctgagaaggccaccgcagtcatttcttcccttcggtcagacacaattcctcagtttagccttcccacctctatacagtctaacagaccagcccttattagtcaaatcagccaagcagtttctcaggctcttagtattcagtgaaacctttatatcccttacggtcctccgtcttcaagaaaagcagaacggactaaaggtcttttaaaaacacttcaccaagctcagccaccaacttaaaaaggactggacaatacttttaccactttcccttctcagaagtcagacctgtcctcagaatgctacaaggtacagcccatttaagctcctgtatagatgctcctttttattaggccccagtctcattccagacaccagaccaacttagactgtgcccccccccccaaaaaaaacctgtcatcatccctactatcttctgtctagtcatactcctattcaacgttctcaactactcatacatgccctgctcttgtttacactgctggtttacactgtttctccaagccatcacaggtgatatctcctcgtgctatccccaaactgccactcttaactcttgaagtaaataaataatctttgctggcaggactatgctgaatctccttaggcactctctaatcagatgtcctaggtcctcccaattcttagaccttttatacctgtttttctccttctcttattccacttagtttttcaattcatacaaaaccatatccaggccatcaccaatcattctatacgacaaatgtttcttctaacatccccacaagatctcccttcggcttaatctctcccactctaggttcccacgccgcccctaatcccacttgaagcagccctgagaaacatcgcccattctctctccataccaccccacaaaaattttcgctgccccaacacttcaacactattttgttttatttttcttattaatataagaaggcaggaatgtcaggcctgagcccaagccaagccatcgcatcccctatgacttgcacgtacacatccagatggcctgacgtaactgaagatccacaaaagaagtaaaaatagccttaactgatgacattccaccattgtgatttgtttctgccccaccctaactgatcaatgtactttgtaatctcccccacccttaagaaggttcttcgtaattctccccacccttgagaatgtactttgtgagatccatccctgcccgcaaaacattgctcttaacttcaccgcctatcccaaaacctgtaagaactaatgataatccaccaccctttgctgactctcttttcggactcagcctgcctgcatccaggtgaaataaacagccatgttgctcacacaaagcctgtttggtagtctcttcacacggacgcgcatgaaacctatatcaaatcaagcctcttaagacaccaaaacaccgatttcacctagtacagaaggaatgagggcctgataactgcagaaatttaaacttcttcggctgggctgggcgtggtagctcaagcctgtaatcccaacactttggagggagctgaggcaggtggctcacttgaggtcaagagtttgacaacagcctggccaacatggtgaaaccccatctctactaaaaatacaaaaatgagccaggtgtagtggcacataccagtagtcccagctacttgggaggctgaggatggagaattgcttgcacctaagcaacggaagttgcagtgagccgagattgtgccactgcattccagcctgggtgacagtgcaagactctgtctcaaataaataaataaataaaataaacttcttgggctggaaattggagacttggtagaatctggtcttaacttcccagccttatcttccctcattcccaaacacctctgttactgtgtgccccaaacaggtttgctctctccacatcaccatctagtgtttttttttttccaacttttcccattatttaatggctagctcaaatggagtatcctcaatgaatcatctcttcccccatccccagttccctaaagagaatgccggcgttttagcactgccttgtatcttttttttttttttttttggagacggagtctcgctctgtcaccgaggctggagtgcagtggcacaatcccagctcactgcaagctccacctctcgggttcacaccattctcctgcctcagcctcccgtgtagctgggactacaggcgcccgccact[157 bp omitted]ccaactaaaggcaaaatcttcttaaacttcctaactcctataacaccccacgtagcaggtactcattaaacattgattgattgatcatggtgggacttgaaagaagactgaagtcatcaagagatggtttgtgagaaaagagaatctgagatgggttttcaagcatttagttgaggaaacgggagcagggcttccaggtaaggagagcaacgtgtattggtaaaccaagaacatcagactgagtagagcaggaaaacgtagaagccacagagaaaaaggcctggaacaaccaaggccagattacaggcaacagtggaatgatttgattcaacacaagtgcgcttctgggagcagaatggactgaggagaggtgaggacgggagagacctgggtctctgggccaagcagaggcttctgcaacaattcaggcaaacgtggggtgacaaggacgctgactgagacgatgctgaaccccaactgctggtttgttcaactggtacagttcacattaagtcgtaacaactgtgaagcttatgtctctacagataccatgtgactcccccccaccaagtgtgtccctctcatttcataatgtgactctaggctgggtgcggtagctcacgtgtgtaatcccagcgctttgtaagggaaaggtgggaggatcacttgaactcgagtttgagaccatcctgggcaacacagcaagacctcatctctactaaaaatcaaaagaattagccaagcatggtggcgtgtgcctatagtcccagctactcaggaggctgaggtagaagacttatttgagcacaggggttcaaggctgcagtgagctatgatcgcacccctgcactccagcctagacaacagcgcgcgagactctgtctcaaaaacaagtaacaaaaacaaaatgtaactctaaatgtagcctattaaactcagcttaggtcatttaaattattcaatacccatattaataccttcaaagcaaactaattccactctggttatagcaagttgggcatttctgggcaagtggtttgactggagtcaggatgtcctctttttgtgaaattatggcagtagtgcctgctttgctagaatacttggtaaactaatttaatgaatatctgtaaagtactttgagctccttggagaacacttccatatataaagaagccttatgacctgcctgcaactgcagattttgcaaacgtgatcttactttttctctcttttgggatatgctcccctttaaactgaagctcaacctcctgaagggggtttcttactaggaaaaatcagacaatttgaggaaatagctatcacctccaagatcccggaagcagtactaaataagagacctcagaacaaggcaatactaggtatctcacctatcccattaccagtccaatttctctctccacttaaaggaggcttccaggtctagcctacaggaaagttcacttattaaccctcaggcagagtactacctgctaaccaggttaacacacatttccttcgtagcactgtaattcacagtgcaatgacagcaatacgcttctataactacagcttcagactgtgctcctcagccttactcagaataggctatcaacactgactcgttaggatattcaagggggtatatgtatgtgtgtggggggggaattcccgacaccgatttcaccatgcttctgtggtcactgcaggaaaaaggtagagctctctgttctctatcatcgctctctttggaatattattctcacttcaagcattctgcctgagcgaagccgtcacttctccaacacatggtcacaattctgaagctgccaggcgactgaacgcagtcggcagcacccaccactaccggagactcagccccaatccgaagcttctcccttagtcagggattggggcgctgggttcctggtgtcaccgccgggcggcgaccccaccacaatctccccaaagcgccgaagcatgtcagcccgaagatcttggctgtcgcctttccccgagcctgcggtgcccgacaggagcccgagttcacgccgccgcgcgccagagcaagaggacgcgccgcagcgagggaagcgggggccggactggggcccggcgccctgatagggaaggggcgtgatcgcaggctgctcgcggcgagggcgagaccgggcgtgggctgccaagaggcgacgccgtggagcccggggaggggacgtgggggtgaagacaggggcagcccagcggctcgagggcaggcagaaacggccgcggctactcactgagccaggactccaggctttccccttccgcctccgccatattgcagccgcccggccccgcggcttcaaaactcgcgagagtctgcacgagctgagacggggcggggcctgcatggggtcctgagaggagtgagtgccgtcaccgagggccgcgccagactgcgacggatacagggagggcaagggtttccttttggcgctcccctttggaccccggagtgaaaaactctaacgtccagatcagtggagagaaacgcagatttaggaccctgaggagtctttttcacccgtttcccgtcactcgctcaggcgcgccgagggcagtccttgtggggtcctcgtggccagccaagatggctgcccccgcagtgaaggttgcccgaggatggtcgggcctggcgttgggcgtgcggcgggctgtcttgcagcttccagggtgagagggtggcgagcagcggcgggggggcgctgcgaggaaggaagggggccacaggcaggccgcgtgggcccctagagagagcattgccctgggggccggagtatctggattcaagcttctaagttagctgcgtgaccctgcgccaatccgaaggtttagtgactacctctcgcctaaggagtctggctgatctagggttctaacgcggagctgaaagtgcggttcagctaaagagctcagatctgggatcgcctgtgaattgggatgggtgtgtaggcgccaagcccatccttaccgttagcacttgaccaggaggagactttacccgcctgcttggggaatgtcctcctacttgggacaagggcctgaattgttgtggctcaggtttagctcgcggtctccgcgccgctccccctcgtcggcgcgttggcagtcatgcctattgttaagtcaaacctactcgcttgtggagtcagcttttgcctgcctcctcctttccccccctcccaggctaactcaggtgagatggagccgctatagtcctgaattcaaggatcccttgattgacaaggaatattatcgcaagccagtggaggagctaactgaggaggagaaatatgttcgggagctcaagaagactcagctcatcaaagctgctccagcagggaaaacaagttctgtgtttgaagacccagtcatcaggttagatggaaacaaacacttgttacatggactgggactatcccagggagggtttctggtgaggattctgtgatacagccttggagagctaaacgtgttgcttttctctttgaagtaaattcaccaacatgatgatgataggaggaaacaaagtactggccagatccctcatgattcaggtaaacagcacttccctcctcagtcatctttcttgcccccctaccccgtagccttgtacttggtactttcagtgtagcttaagagcaaatggattcatgtatctattattcagattaacttccctgcatgtgtacgggctttaatgaagccctgtaagagtcagcaactgccattccttggtgtttcggaagtaaacacacaattaaaaaaaaaggaacaaataaaaaataaaacaactgccattccccacctcaccccccaccccctccatgccacaaatctcaatccactctttctgtcctagtctagcaaagggggaggcacttaaaaactttgttttggatgtgctgtgagaggagctgcattgccagcgcagaaccagaggatgggagtaaagggcaaggtactagcttggctgggtaaaccctttagggagcctggggcagcctcttccaccatattcttttgcagactctggaagctgtgaaaaggaagcagtttgagaagtaccatgccgcttctgcagaggaacaggcaaccatcgaacgcaacccctacaccatcttccatcaagcactgaaaaactgtgagcctatgattgggctggtacccatcctcaagggaggccgtttctaccaggtgaatgaatggccagggcaagaaagcagggccctccacatgtgaaacaagataggtggtgcttgggagttgggtcaagattgatagctttctagctggtgcagtgggattgcacctgtaatctcagcactttgggagcctaatgcaggatagcttgagctcaggagttaagagacagcagggcaacatagggagatcccgtctctacaaaaaaaacaaaaaaattagccaggtgtggtggtgtgcatctgtgctcccaactactcaggaggctgaggtaggaggatcacttgagtccaggaggtcaaggctgcagtgagttatgattacgcccctgcattccagcctgggcaagagagagaaac[131 bp omitted]gtttctactaacaatacaaaattagccaggtgtggtggcacataccagtagtcccagctacttgggaggctgaagcaggagaatcgcttgaacccaggatgcagaggttgcagtgagccgagagcacaccaccgcactccagcctggcaacagagcaagacgccatctcaaaaaaaaaaaaaaaaaaagaattgagactgttacggtccactcatctgagtcctgtagcgtaaaaattataggcagaaggtggaagagagtgaagaagtatctaagtgacatctgggagcccacctcccttcgccttcttctgtcaagcatcctgtgtgtcctaacctgtaaaattctcatggcgagggactattcatatcctgtctttgtatgccagtgtttggcatagtgcttgaccgataactgatgcttcatcagtgtttgctgaacagtactaggtatctctttcatagcatttaattatattttattgtcctgagttttcttgtgttctcctttttcaatatcaactccatggggtagggacttcattattgtctgcactctcgtgtctggcatggtactgacgcatagtgagggcctgacaaatgatttttggacacggggtcttgtttttggttttctttaactgtttgtatagggtctttttgtttttaacttttttttttttttttgagatggagtttcgcttttgttgcccagactggagtgcagtgctgtaatctcagctctcggctcactgcagcctccgcctcccgggttcaagagattctcctgtctcagtccctgcccaccccaagtagctgggattacaggtggccgccaccatgcccagctaatttttttgtatttttagtagagacagggttttgctgtgtctgaagactgaaggggtcttgtttttaggtacctatggtctgaggtggattagtcaccccagctaatggggcttttcctatttggttcttataacaacttggtaggactaccatttaggagggaaaatggccagtgcttttcttctttttctttttctttttttttgagacgaagtctcgctctgttgcccaggctggagtgcagtggtgcattcttggctcactgcaacctccgtctcctgggttcaagcatttctacctcagcctcccaagtagctgggattacaggcgcctgccaccacgcccagctaatttttgcattttagtagagacgaggtttcaccacattggccaggctggtgtcgaaatcctgacctcaggtaatccacctgcctcagcctcccaaagtgctggaattacaggcgtgaaccatcgtgcctggccttcttttttttttaatatatggagacagggtcttgttatattgacgaggctggtcttgaactcctgggctcaagcgatcctcctgcctcagcctcccaaagtgctgggattacaggtgtgaaccacagtgccgggagaggccagtgcttaattagtatttgctgaatgaacgcctcttatgtctgctacactggggtcacctgaaggtgagggaagctcgaagaaaagacaggcccttctccccaggcctgaccagggctggtccagagggaacatgtggctactccttagaattcagggaggcaggaggccccaaaccctggcagactcttggaccaacttgcctatgtcctgtctcacccaggtccctgtacccctacccgaccggcgtcgccgcttcctagccatgaagtggatgatcactgagtgccgggataaaaagcaccagcggacactgatgccggagaagctgtcacacaagctgctggaggctttccataaccagggccccgtgatcaagaggaagcatgacttgcacaagatggcagaggccaaccgtgccctggcccactaccgctggtggtagagtctccaggaggagcccagggccctctgccgcaagaaacagtgtgagctactgccacgctgaaaactacctgtgggttaaggatgtagttcctttgtaagggtgggcaggcctcgtaagaaagatgtagcagcatattcactatccgttaatccttctttctttgaggctggaacttgctctctctgcccctatttccttgtaaagagggagcacattgacttgggaatttcctccaggaaactcagggctgttttctcttcccttaggttggggcggacctttggatatataaaggaagcagttttagtatcagaaaagatttattagaaaattctcacgctgaactggtgtagcatgtggtgcagcattcagtgaaactggctggaggaaataggcttgtttccagagttgtccttatacaaaatgtataaaaagcagtttctggtgtgacttgtgctctgcctccaccccttgacatcccaaaatatcccaccagtggctatgcttacccattttacagatgggtaaactgaggcaccaaggtagtagttgcactaatggttacacagtgcagtggctcttgggagttgcccttctctgcctggccgtggtgggttgtggtggggaaaggggctcagggcaggaccacggcataagtgggaaacatctcaccaggagatgggaaagtctagaagggaagacactcaaagtctggaagggaaaagtctttgggtgaggcagagactccactgccagctttagaggtgggtagaagaaaggccagtgctggtgaggaagccctgatctggaggcctagtcggagacttcgctgtagtaatacttgtgggcagctggcgttgtcttccagccggccgcccggaactcaatgatctccagcagcagcagctgggccagggagctgaggccagttgggagcaggaagccatcccggatcagcacaaagagctcatccatgcgctgcccattcattttctccagctgctccccaacccggtgcagctgcagcaccaaacagtccacctgcaggcgacagtgtgggtaacacaagtgaactggggcagtgccagcctctcacacagcatttgccaagtgccaggtgctgtgctttgcctttacactcattcccttgctccctccttaccatccagtgggtacttccacatcttacacagaaagaaatgagttccgggacttgcctgaggtccctcatctggccaggctccactcaagcctgtctccaaaccacttcttcatcccactctcctgcctcccacacactgcctgaccctggtttggctttggggccgtctgtacccacagctagccatggcttgcacagctgccatcatacgttggctttctgactgagaaggaagctactgagccagtaggttttggctgctctctattggataaactccagacctggcagcttgtcctataactgacaggccttaaacacccccacagtcctgccccagaagtgacacagtcctcagagacctccgtgagcagtgggctgacacacggctgagctggactgtccatcctgcagccttctgtgcttgtgccagggctggggccacccacctcctcctccttgctcaaactgtctggctgggccagccggaagaggcagtcatagacagggttcaccagggccatcatgggcatgttgttcacctgtgaggaagaggaggggtcagagcaccaggcttagtggccaaggggagcagtccaacctgggcctcaggaaacaggccatgtctgcctcccagggtggctgccggggcctcaccctcaggtagtcaaagatgttgcagataaaggtgacatagcagacccagccctgcagggagcgtgctcgcagctgctcccgagcctggtactcctgctgcagccggttgaggagtccacgtcggaagacactctggcctgcttgtttactctctgcctgtgagccagggagaggaaggtgaagggtggggggcggtgcccctgtaaccccacccatcctatgcctctctctctctttgagctagaccctgtgcatctctgtcctgcaggccaggccttctgcccactcctgaagcaccttcctcaaagcagcttcctttcctctcccaacccccaacctgaatgatggcgtagcacatgcgtcctgcttccttgctgaacacacagtcctgcagagaatggtccacaatcacattggccactttctccaagtccacagcacccggatctaggggtagagataggaggggagtctagagctgctgctttatcacatttgtgtccacccgcttctaagaatttgagatatttacagtagagcactcatatgcttgaagtgaaagagatcagaaatcatacagaggacagtggctccagtggtgcaattggttagcgcatggtacttataagaaatcatggccgggcgcagtggctcatgcctgtaatcccaacgctttgggagaccgaggtggttggatcacctggggtcaggagtttgagaccagcctggctaacatggtgaaaccccatctctaccaaaaatacaaaaattagccaggtgtggtggctcgtgcgtcatctcatgtcatccaagctacttgggaggctagggcaggagaatcgcttggacctgggaggcggaggttgcagtgagccgagatcatgctattgcactccagcctgggcgacaaagcaagactccgtctcaaaaaaaaaaaaaaaaagaaaaaaataaaagaaatcatacagagggcctggtgtggtggctcatgcctgtaatcccagcactttgagaggctgaggcgggtggatcacctgaggtcaggatcaggaggtcaagaccagcctggccaacatgatgaaaccccgtctctacaaaaatacaaaaaataagctgggcacggtggcgggcccctgtaaccccagctacttgggaggctgaggcaggaaaattgcttgaacctgggaggcggaggttgcagtgagccaagatcgtgccattgcactccagcttgggcaagaagagcgaaactgtctcaaaaaaaaaaaagggaaaagaaaccgtacagaggacagtaaccatacaaacagctttagctgtcttgtcttctggttgcccagtcagagaaaatggggagggttatgtggctagtagggaccaatcaaagtaagaatgtagtttctcaggaaacacatcttttcctggcactaggttgaggaaggaatactgaccaggacatgcctccaacagcaatttcacaagaaaaagtgttcttatactacacacatgcaaacccccaacaagagagggccacatagggcctcccaacaggctcggcttgacacatgatgggtgttgctaattattagttgaagacaaacctctgtactgcgtgttacagcgggaaggcatcaggcgagagcaattactatagctcctctggcaaacggaatattctccatcttctgtctcaaagcaggcaactgtgcattcaagagacggggctatggcagcacagaaaccagcaattcaaatgta[132 bp omitted]ggcaccctcaccctcccaggctcaatcaatcctcccacctcagcatcttaagtagctgggaccacaggtgcctgccactatgcccggctaatttttcttttctttctttttttttttttttttgtagagatggggtttacaccatgtttccgggactggtcttgaactcctggactcaagcaatctgcccaccttggctttccaaagtgctggaactacagacatgagccactgcgcctagccctatggttaaacttttaaaacagtctttacagtctgagaggtgactgtgattcatactccaaaataatggcctcaatgtagcttgtcttccagttcaagaattacgttgccgactcctatcgtcagagaatgaggggaggggtggaggcattcaccaggctcagcctctggtgctgcccacaggggcccttctctgtagctcctgaccccagctcaggaggggtcccgtgctcacctttgagtgctgtcttcagcagctgctgggtctctgcatcaaaggactggattttatactcctctctactgggctcccccatgactagccagccccggtagctcttgactgggctgggaataaggacagcacctgaggagaagaggcgaagggagcggcctcaggtgtggagcgcagggcgggttccgtcctgcaggccctggacggggctgacggcgcgctcgggacagggactcctgggcggtccgtggcgtgcggtggttggctgaaggcccaccaggcttggcttctggtggggactgggcatcagccaggcacctgctgctcagtttagaaatccctcgcttgtgggattacacaagagcgagaagctgaagcaggaaagcgcccaccctccagtcccagcaggaggcaggagtagactggggcagggtgtgtgcgggcggacgttacagttgcttaaataaaccggcctgacgttgctggcccaggaagatgccgggtgagggccaggctgggaactccaagcggtgcgactctgtccccagcaggtctccgagcccctctccccaaccctctctttctggctttcgccgagtccttcggtctcaacacccgccgctgcatcccccggatggggccggcctgcgtgggtggggacgcaggcgccctgtccgccgcccctgccgggagcagcctgaactccccagacccgtgccagcttctccctgggacaggctggtcggatcggctcccgagtggcagtaacccggccctacgcactcgagactcctaattcctgagctccattctggagccttcctcttactggggggcaggatgatgcgccccggagaggtggctcccgccggaggctcccctctggccgtaggaggcgcctttagggtctccagccctcggccgttccccccgcgcccggaacgcccctcccggaggcacagggcgggctgcggagcccacggcccagggtcccgcgggcgggagaggcggcgtgggagccgggacccacctgccgggccggtggcgcgcgcgcgtgcccggggccgctcggcgcctgggagcgcgcaaccagcgtccggcgctgcggggcccgccgtgagctcatctcctcgcgcggcgccggggaagggtcggctcgcccgcgccacctgccgggcccccggggcactgccctggcctccaggccgccccggaagccgcgccgcctgcgtgggaccctgcgacgctgccacccagccgcaagcggaactcgcttggctcgtcaccccttcacccggtgcgcctgggccgtgtccgggcccacgccggacccgccggcacctcgatcttgcgcgtggccccgcacccagccctccccggagctcaggtgcactgggccgggagacaccgctgggctgcgcggcgtgggaagagcctgcagagcgcgtggtggggacctggtggcaggaggaacagcatcagccctggtcgcaccactttccccgctcccccaacccaggtagagaaggcaggggctgcagggccggggccagccacaaccctctcccgctccaaggaggacatgggcgaagcgagtttcaggtcataggggcagccccgagaaaggggccccattggcaactcgcggccgtcggttgttgcgaatgcccctgaagtggcgcggaccccaccgcccggcgtctgccctgggtgacaggagggcacctagaagtgggggaagaactgccgccgctcctgccgcgcgaccgggaggagcgctgccggcgctgcccgcgttctcgcctccttttaaaagaaccgccaaagtggtcaccgaaaacggaggaggaagagaacgctcagctgcagcaaaagaaaccaatgggcaggaaagatgaagagaagaaactttaacggaatttcataaaaaatgcattcaggcagctgcatcctcgtggcccccgccgcagcctggaccttgggaaccagcagcccagagccaggaagccccagcattcagggcccagacagaccccaaaatcccagaccagaggcagggaaggatggtgcgaggaggagcccaggacccacacgccagggccagggccagcgccggctcccagtgggtgcctctttccaaggctggagagggaggcagaatggagggcttcccaggtcggagcaaccctacaggccgggcagatggagggaagggtggaggtcatgttctggagacctcccctcagcctggaactggtttctcctctgcctctccgcctgtgggtgtccctctgctctggtaacaccccaggcaccagctgtgccctcaccaggctacgtgcccgccccttccttctgccatccccatcagtgggctgcttcagagccacggcccttctggggctacaggggaggatgcacccgcagcatgctctgcactgaggagcaggcagtgggcgctgatgccacctgtcctgctgatagctcctcacccagcaaggctgacccagctctgggtgaaagaggagtcagtgaggtagactggggagaggctgcaccttcacccacgcctgcccacagcatggcccatccacttcctgcacgggcgctgggatctgctttccatggagccccacggccatgaccagcccggtcctgggagaggacagcctgggtggtggtgtgtctgcagacacgaaggtctgggcacggggcccagaaagtgactggctcagcctggagtctcccccagcactagaagcagagctgccaagggctgccgctatggagaacatgggatttgaggaaggcaggagtcctttccctcatactttgtgagtaggcagatgtgccaggggagatggagtaagataaggaatgtgtgtttagctttaatgtctattaaataggttggaaaaacaggccaagtgtagggacctgactcctgcaaagggcctaccgcagccctctgcactcaagcagcagccccatccagaccaggagtgtgttctgttctcctggcaggcagggctgataggtgtaggatggcgtctgtttcctttggagtgtgggctggtcagaggagaaacagcaacttcctgctccttctcactgtgtcgttggctcaccatagaccacgtcctgcattccctctgattctctcatggggagagccctggaccttctggtggtgtcccagctgggtgggttcaaggctgctaccccgcttggggcagctggcctgcagggaagggccagacggcacctctcagtggagactgaatcttccttccttcaggaggctgcctccagggaagacctggggtccttcctgcactcagcgctggctggctgtcctgttcatgcagtggaagacattacagaagaattcatacgagaagaacatgaagcctgtggagagggcagccttcagcaagctgggggacaggcccttgaagaagcccagggcgccttccttttgcagcacctgcttggcacagtccatgaggcccttgtatctccgtacctggggagaggaaagggatgaaaatatggatgcccgctctgctcccatcaacacagcccctggcacatcacagatcttaagaagtacttgctggacaaagaaatgaatgcaaaatagcaaattattttattttttcgttgaggcagagtctcactctgttgcccaggctggaatgcagtggcacaatcttggctcactgcagcctctgcctcccaggttcaagtgattctcctgcctcagcctcctgagtagctgggattacaggcacacaacaccacgcctggctaattttttgtatttttagtagagatgcagtttcgccatgttggccaggctggtcttgaactcctgacctcaggtgatccacctgcttcagcctcccaatgtgctgggattacaggcatggacaaccatgcccagctcaaaatagcaaataaattaatttcattctttctactgtaattgggttaagactgaacagatgacaggcctagaaatcagaagctggacagcgctccttcctgcccaggaagaacggctgcctgtggctccaaaggatccagcaatggctccagaacctcttcccagaggcatctctgacccttcatcccatcccacctgatcccccttgggcagcagatctgaacctggccctcagtagctctcagccgggcctccctgcctccagcctcaccctctccagctgacctcacacactgctgccagacattcatccccaggcacaaccctcctcaagcctggcttccctccaaaagctgcagtaactcctagtgacgacatcatgagaaatcaagtccaaaccccaagatctgccgtttaaggcactgcaccatttggccttgatttccctccctgatctgacctccactggtcctcccacgtgcccttcccacctctggccaaactggattacactagtctttgttagcagtaaggcctccctctgccatcctgggctctcaccatcggctccctgtccaaattcaaactgtcccttcatgctgggtgcagtggtgcatgcctgcagtcccagctacttgggaggctgagaggggaggatcgcttgagcccaggagttcgagaccagcccaggcaacagagcgatatcccatttaaaaaaagaaagaaagaaaagaaaacaaactctcccttcaggacaagttggtaagtggaaaagggaggttacaaaccttgtatacagtgtatccgtatttttgttaaaatgtacatgtgtatttatgaaaagaaataaaactacactgaaaggttcc[138 bp omitted]cctcgaactcctgggcttaagcaattctcctgcctcagcctctctagtagctggaactacaggcacacaccaccatgcccagctaattttttaatttttattttgtagagacggggtcttgctatgttgaccaggctggtttcaagctcctggcctcaactgattttcccattttggcctcccaaagtgctgggatcacaggcgtgatccactgcagctggcttggtctttctttcatctatcttaaattttctaaagtttcctacaaagaaaatgcattataactataaacccagctctttctcttcccccaaggaaggaatgctctctccctaccttgcctcccattccatgccatccctctcctctgacattgtcaggcatattttttcacacctccgcatctcaggttcccaggatacagaggggaaaggcctggaattgcccatccttagcctacccctaaccctacccactgaccaaaagaaagggagtatgtaaaaatctgagcaactgaggagtgactactgagactacaacatgacttagcacggggcttctcttaatggccaactctcctagtgcacataaaatacaacttaggcccaggtgtggcggctcatgcctgtaatcccagcactttgagaggctgaggcggacggatcaactgaggtcaggagttcaagaccaccttggccaatgtggtgaaaccctgtctcatatggtgaaaccccgtctcttctaaaaatacaaaaattaggacatggtggcgggcgcctgtaatcccagctgcttggaggccaaggcaggagaatcgcttgaaccagggaggcgcaggctgcagtgagccaagatcacgccactgcactccagcctgggcaaaagagcgaga[214 bp omitted]gaggcaggagaattgcttgaacccgggaggcagaggttgcagtgagccgagatcgtgccattgcactccaggctgggcaacaagagcaaaactccgtttcaaaacaaaaacaaaaacaaaaaaatacatatatatataacctagttgctcaaattcacccaattccagaacagctacagcaaaaccccttttctgtgtgctttaatatttggggaccttccttgctctgttgcccaggctgcaatgcagtggtgcaatcgtggctccctgtaacatccacctctcacgttcaagcgattctcctgtttcagcctcccgagtagctgggactacaggcgcccaccaccatacccagctaatttttatatttttagtagaaacggggtttcaccatgttgatcaggctggtctagaactcctgacctcaggtgatccactcgtctcggcctcccaaaatgttgggattacaggagtgagccaccacgtccacgcccagcctctggacatatttttttttgagatggagtcttgctctgttgcccaggctggagtgcagtggcgcaatctcagctcactgcaaactccacctcccgggttcacaccattctcctgcctcagcctcccgagtagctgggactacacgtgcccaccaccacgcccggctaa[138 bp omitted]gccaggatatgttttaagagcagaaattgtgctaggtgcagtggctcacacctgtaatcccagcactttgggaggtggagtcaggagggttcaagaccagcctgggaaacagagtgagaccctgcctctattttaaagaaaaaaaaaaagagcagacactgtatgtccttggcccagatccttccacagtgctcaggacccagggcttgcatgcagctttcccacatgcttagggatctcaaggaatggacgcaggtgaaggggccatggccaggggtgatgttgcccaatgggtaggaggtgactactggttccctcatgtgcccagtgatggcaagggtcagagctgtctgcctgggagtgaacggctcacctggccaaaggcagctctggcatgctcaaaccctccaacctgtagccgcttcttgaagaggtccagcggatatgtcagggtcttgctgatgacaccagctccactgccacaaagcaggttttggaggttctctgaaccagagaagtgggattgggagaatggatgagagaaatgcagtctatgggtgacaacttaaaaggcgtcagggctaatcctccaccacaaaccaaaccccacaagcgcacttctatctgacctccactggtcctcccattccaaaaaggaatgtaatctagggggagaagagccagacacggccacttctggtggagtgatccgggctggaagggttggaggccgcagtcccccagctggaggcaacatgggcctcaggctctgcagcatgactcagttcagggctggagaggaccaggatgccccacccctccccagcctccccctgcccccatctcccactccccctgcctggaaaaagcaactgaagaacctcaaccaaaaaacaagcaatttgcaatttggacttctgacaaaaatgaaaaccatgaccaatcactggaagtaaatttcagtaatgccagtgatgggtgtggcaggagctggaagaaatcaagtcctctccaagcagctgcagttgttttgtttgccacattacagagccaggtacagagacccgcggtctttgattcggacaggagaactttagctcctttgtgatttggaagggggtgttctggtggctggggtgggagggctccctctcgtgtgagggctgcctcaccatttttctttccttcggctggtatggcccacttgtacaggtgcttcaaggagctgtagcaagagaactgcagcccggcgtaggggaagatggcgatcaaggtgggagccaagcctttgtagaaaacctgggggccttcgctcctatacatggtccccacggcgtggcgcagcgtattatagacctggacacacacacgcactttgaatgagctcagtgaagtggttttagccctggaacagcccatcatagctctgtcccctcgcctaaaataccagctaccaggagcgaaactcctcctgccaggaagacagtcaagggaaacgctggacagagattcgaaggatggcattttccagaaactcccccttctacacatgtataccactgttatatccacaggtgtgcacaaaagtatgtgtccaggagtcactgcagcgtcctggggaagagctaaagacgcgatgtccatctgtgggtgctggttacgtgaattatgggacacc[135 bp omitted]gccaacatggcgaaagcccatctctactaaaaatacaaaaattagctgggggtggtggctcatgcctgtaatcccagcttcttgggaggctgaggcacaagaattgcttgaacctgggaggcggaggttgcagtgagctgagattgtaccacggcactccaacctgggtgacaggcggagactctgtctcaaaaacataaataaataaataaataaataaataaataaataaataataaaaataaagtagagaggaggtcttgctatgttgcccaaactggtctcgaactcctgacctcaagtgatccttcctccttggcctcccaaagtgctgggattacaggcatgagccactgcacccggccaagcatgttacttagaattatggaaggaaataatcaaagaaacaactataagtagtaaaagtagtcgcctctggggatcggaatcagggagcggctgggtattttttaaaattataattcatgaagaactgtctttgtaaccttgatacatcttatatgttgtaaaattttttatcgttcaagatcatgtttataatatggttgtgactagtcttaaggcaggtggagagtcttgtaggttttaaccacatctcttcccctcactttcatgaccagatattctctgatcattctagaatctaaaatccaacatgtcaatagttgaagctagaggtaatatgctattatctttttttttttttttttttgagacgaagtcttgctatgttgcctaggctggagttgcctaggcacaatcttggctcactgcagcccccacctcccaggttcaagcgattgtcctgcctc[131 bp omitted]ttggcctcccaaagtgctgggattacaggcgagagccatcgcgcccagcccaattctttgttttttttgagacaggatatctcactttgttgtttgggctggagtgcaatggtgcaatcatggctcactctccaggctcaagcaatcctctcaactcaatcttccaagtagctgggactacaggtgcacaccaccatgcctggctaatttttttgtattttgtagagagccatgttgcccacatcaaactcttaaacaaattatccttcctttcccactaacagtatcctaaagcagagttgagacagtggaaaaattattgtttataagccaggtctggtggctcagccttgtaatcacagcactttgggaagccaaggcaggaggatcacttgagcctaggagttcgagaacagcctgggcaacatggtgaatgaaactccatctctacaaaaaatacaaaaattagccaggtgtggtaccaagtgcctatggtcccagctacttgggaggctgaggtgggaggattgcttgaccccaggaggtggaggctgcagtgagctgtaatcatacccctatacttcagcctggatgacagagtgagactctgccttaaaaataaagaaaaaaagcccaggcatggtgactcatgcctgtaatcccagcactttgggaggctcaggtgggcggatcacttgaggccagcagttccagaccagcctggccaacatgtcaaaatcccatctctactaaaaatataaaaattagccaggcatggccaggcgcggtggctcacgcctgtaatcttagcactttgggaggcagagatgggtggatcacaaggtcaggagttcaagaccagcctggccaacatggcaaaaccccgtctctactaaaaatacaaaaattagccaggcgcggtggtgggcgcctgtaatcccaactacttgggaggctgaggcgggagaatcacttaaaactgggggtggagcttgcagcctcagcgacagagtgagacttcatctgaaaaaaaaattagctgggcatggtagcggacctgtagtcccagctgcttgggaggctgaggcatgagaatcacttgaatctgggaggcggtcacagtgagctgagattgtgcctccagactgggcgacagagccatactccgtctcaaaaacaaacaaacaacaaccaaaaaaaaaaaaaaaaaccaggagttcaagaccagcctgagcctgagcaacataatgagaccctgcccctacaaaaaataaaaaaataaaaaattagtcaggtgtgatggcacacacctgtggtcttagctacttgagaggttgaggcaggaagattgcttgagcccaggagttcgaagctgcagcaagctattgcagccattgtactccagcctgggtgacagatcaagaccctgtctcaaaaaatatatataaataataacaataaaattattctttcttggttgagaacacacagacacacatacatatgatgctattcttaaatatgtccaggaaacagagatcatggtggggaggtctatttcaggatttaatcccttgttttcactcagtaaattcttcctcgagtctatcccatttccaccagcccattctttgtggaaaccaaagacactcgcaattggccgggcgtggtggctcatgcctggaatcccagcactttgggagacagaggccaggggatcacctgaagtcaagagtttgagaccagcctggccgacatggtgaaaccctgtctctacgaaaaatataaaaattagccggacatggcatcacgtgcctgtaatcccagctactcaggaggctgagacaggagaatcgcttgaacccaggaggcagaggttacagtgagctgagattgcgccactgcactctagcctgagcaacaaagtgagactgtctcaaaaaaccaaccaaccaaacaaacaaaaaaacaaagacgctctcataataatccagcaataaattctcaagtgggcagtccttgatccagcccactgctgggtaattatttgttctgtttcatagcagtaggttctgtcttccagggaggctgtgagctcctttgaggcagggacatagagcaccccgcacagtgctgcccacagtcatgggttttacaaactgactgccagacaaactgaaaacccgaacctctcccagctttgctttctgcaaggacaagaactcaacctctgccgagtgcggtggctcatgcctgtaatcccagcattttgggaggccgaggcgggcagacggcttgagctcaagagttcaagaccagactgggcaacatgacgaaaccccgtctctaaaaaaatacaaaactcagccaggtgtagtctcagctaccggggaggctgaggcagaaggatcacttgatcccaggaggtcgaggcttcagtgagcagtgatcatgccactgca[164 bp omitted]ctactaaaagtacaaaaaatagctgggcatgatggcaggcgcctgtaatcccagctactgggaggcggaggcaggagaactgcttgaaatcaggaggcagaggttgcagtgagccgagatctggccattgcattccagcctgggcaataagagcgagactccgtctcttgaaaaaaataaaaataaaaataggtcggg[133 bp omitted]tggtggcgggcacctgtagtcccagctactcgggaggctgaggagggagaatggcgtgaacccaggaggcggagcttgcagtagccgagactgtgccactgcactccagcccgggcgacagagtgagactctgtctcaaaaaaaataaataaataactaaaaataaaaataaaaataaaaatcatatatttaaaaaaaacatgcttatcaaataaaagaaaaaaatagatcgcaccactgcactccagcctggcaacagagcgagactctgtctcaaaataaataaataaataaataaaaaataggccgggcgcagtg[170 bp omitted]gaggcaggagaatcgcttgaactcgggaggtggagcttgcagtaagccaagatcgcaccactgcactccagcctgcatgacagagcgagattctgtctcaaacaaaacaaaacagaacaaaacaaaaataaataaataaataaataaaaaataaagaatgctacccctgtgacaacaccttccttatttgggcttccccggtctggctcctggccactcaccttgggctcaccctgagctgcaaagcgggtgcgcagaacatccacggggtgcacagtgagggtggccatacaggcagccaggccaccacatacaaagtgcactgagaattcccgggcgtcatacacgctgcctctgtggaccagctccgtcagcatttcaaatgacaagaactgcaagagtaagtgaagaagtcaccgacagcccaaaggatgagggtgaggaccaaatactccccaaatacatcacccgtgacccggctggggcccaggtggaggggcgaggaaaaggtcaggaaatgttcttcttgagcagtgacagcatatgataaatacaacattctacgcaaaactcggatgccatttgatacttgagtagagtcagacactcaaagggttaagaagatatatgggggccaggtgcagtggctcacacttgtaatcccagcactctggggggccgaggcgggcagatcacgaggtcacaagttcgagaccagccgggtcaacatagtgaaaccctgtctttactaaaaatacaaaaattagtcaggcatggtggcgggcacctgtagtcccaggtacttggggggctgaggcaggagaatcacttgaacccgggaggcagagctgcactgagccaagatcatgccactgcgctctccagcccgggcgacagagcaagactcggtctcaaaaaaaagactgggtgcagtggcccacgcctgtaatcccagcactttggaaggccgaggtgggcagatcatgaggtcaggagttggagaccagcctggccaatatggtggaaccctgtctctactaaaaatacaaaaattagccaggcatggtggcgtgggcctgtaaccccagctacttgggaggctgaggcagaagaatcgcctgaacccaggaggcggaggttgcagtgagctgagattgcgccactgcactccagcctgggcaacagagtgagactctgtctcaagaaaaaataaaaaagatacatgagaacaatgtatatcagaaaatgtcactggctaacttagttttctgagaactggggaagacggccatgctctgattcctgcagggaccccttcagtgcagctggcggcggcacctggtggcggcactgttcgagaatcattcttttctggggcagattcttttgggagcatgttccacagggtgacccccttacattcagatctttctttttttttttttttttttttttttagggacaagagtgtctctctgtcacccaggctggagtacagtggcacaaacacggctcactgcagcctcaacctcctgggctccagtgatcctctcacctcagctcctcaagtagctgggattacaggcgcatgccaccatgtccagctaattttggtattttttgtagaaccagggtttcactatgttgccaaggctggtctcaaactcctgagctcaagcaatctgcccgccttgggctcccaaagggctgagattacacacatgagccaccgagcttggccctgttttgctttttgaggcaaggtcgtgctcagttgcccaggctggagtgcagtggctcgatcacagttcacagcagccttgacttctctagctcaaattattctcctgcctctggaatagctgggacgacaggtgtgtaccaccatatctggctaatttattttttatttttagtagagaggaggtctccctaatgttgcccaggctggtctcaaactcctgagctcaagccatcctcccacctcagcctcccaaagtgatgggattacaggtgtgagccactataccagggctatgctcagatcttccttcagccaactgaagatggcctggcttcttttctttttttgagacagggtctggctgtgttgcccaggctgaagtgcagtggcatgatcgtggctcactgcagcctccgcctcccgggctcagatgctgggattacaggtgtgagccactgagtccagcccacgcctggcttcttgagactatcctgttgctgtatttattcgtcatgctgcaatatctgtttgcagacaagtgcagagacaggatcgcagggcatgcccagccagtaagcacctgacttgggcggtcactgtgatgtcacaggaagagtaggaagggacatctctggcactagctgcctaggtgggggtcgtggctctgccattttctagccagtggctttggttgggttaattatgtaagctctgtccacctcagtcttctcatgcatgacatgggagggacaacagcccctaccttaaggactgctgtgacagagtgtatgtgaagtgcttccaacaggggcctggcccatggtttgcactgtacagggctggttcttaaacacatctactgcataaaatcacatgctgtgcactatgactatactagtgctccactgaacgaagcatgagttctaaccctagccccgccatgtgcaggctgtgtggcctcggacagctgacttctcctccctgagatccacatgacagctaccctgccctcctcatgacggtgtggtgaagttcagatgaaccacatatgtgaaggtggtatttcaaaaactgaaatgcattagtgctgtccttcgccaagcctcacagaaggcatgacatcaaatcggtctccaagatgcaacacctaagtcacacaggatagacgcagggacatggcggagggcaatgcctacggtactgctggtcaggaaggctcccgggtgaggcaggtgggaagcgtggggcctgcctcttccgtcctgccctgcgcggcattcctgcttgcctcaccctccctctgctcctccactgagcaacgtgaccccagaggtctggccaggtcccttgccacctacttggacagctccatagcctatggagagaatctgagctgggacgtgtcctttccagaaagctgtcggaccctcctcctgcagaatctgcctagaggcctggaggatgccatggtactttgcgctggggtcactgcgagacaggcgctcatgctgaagctaggaatcaaaataaaaaaggtcaggacagtggggtgggctggaatgtgaaggggaactttcagaaaaggcaagcccttcatctggatagaattccaagttttaggaactgcttttgcaagaaagactgaacttgtcctccagtccattgcatggaaaaaggggaagagtacctggaaacggatcttgatgacgtcgaagggactgatcagcgcccgagtaacaagtccagacacagacccagccactgccacctggaacttggtgttattcctgccatctggtttggggtcatagccaaccatccctgcctctggcccacacaatgtccatcagtatcaagctaaatgcaagagatacggaataaacaccaggcaagtttcttatggtctctgctcaaatatcacctcctcagagcagccctccctgactagactgtctaaaatagcactcacttttggactgggcgcagcggttcatgcctgtatcccagcactttcggaggccgaggtgggtggattgcttgagctcaggagttcaagaccagcctgggcaacactgcaaaaccccaactctacaaaaaatacaaaaatttaaaaataaaataaaatagcacttgttttattcctctttacagtacttattactatggcatatttgtttacttttttagagacagggtctcactctgttgcccaggctggaatgcagtggtgccatcataactcaccatagccttgaactcctgggctcaagtgattctcttgcctcagcctcccaattagctgtcacttaacaggtgcaggcctggctaagttttttatttttgtagagataaggtctcaatgttgccctggctggtctcgaactcctggcctcaagtgattctcctgcctcagcctcctgaattgctgagattacatgcatgagccacagcgcccggcacgccatgggttatttatacagtacatttgtttcttgtctctctccctgactagaatgtaagcccgtggaaacacgaccttggtctcatttgttcactcgtaaatttccggttcctggaatagagcccatcatggtaagtgcttaataatatttgagaatcgaatgaacaggcttgataggcaattgttggtcccagagatcaactggttttccaagacatctggcaactttatagcaaactcctgctcactgagtgagcccactcaagtgtaacgctgagggactgaaggacgtgcagggctggagaacagggattgggattctttaacaatcccccactgtccaaaggaagagccctgaggccctgagccccttcacctttccctttcccctcctgcacacacctcagaccaccccg[151 bp omitted]tctctaataaaaatacaaaaattatctgggtgtcgtggtgggcgcctgtaatcccagttacttgggaggctgaggagggagaatcacgtgagcctgggaggcagaggttgcagtgagctgaaatcacgccattgcactccagcctgggctacagagtgagactccgtctcaaaaacaaaaaaacaaaacaaaacaaaaaagaaaatgacgctcctgggctcccctgactcagacctactgacctcttcagcctcactctggaccactcttccccttccctcatttaaccagagtggtctgactgcttctgcccagttcctggaaaactcggggagcactcctatcaattgccttgcctctactcctccagttccctacgtctgaaatacagccccactctcagcccctactcactttttcaaggctagctcctctcatccaccagagctcagctaaaaagcatcccttccaggagatgtacttttttccttttttgtaaaaacaaaaaacaaaaacagtaatacctacatacggtctgtagagttgtacaaagcatagaaagaagtctgtaaccacacacatcaacaggtagttggtaactgatcacagggagaagggctgagaagggaaaaaggaaggtagacctgtcgataattctatactgtttgaatttgttatggcaaaaaaaaaaaaaaaaaatccctaaaactagccttcagaattaccctagttcttgaatacttgtagtagtgggggtgggggtgggggaggaggggagatactacctacaggatggcagcctccaccccagacatcaattccttttctcctctcacccaccctggaactcctccccaggcgcccatgaggaagtttaaacacgcggcaagcgactgagaggcaaaacctctccaggggttacccagggaccgctcaggtcacactgagcagcgtgtttcccgcccatctgggcagaaaggaggagcaagcccgagtggcaggtgtcctggatcgctgtcaggagaccggagcataccaggctcttcctggtgttcgggtgcccatgtgcccaagggctcagctgagcaaatctgcagaggtccccgtgtgggtacctaggtgtccacgtgtgcctcggggtgtgttttttctccttgagtccgaggggacgccctggagctcaggtgctcaagggcgtgcgcggggctcggccgccggtgtccctggagatgcttctctggtctggtgtgacacgtgtgtacacagtccccgccctctcgtgagcgcccgggtgcgtgtgctccctcccgaccaccctgaggagcgagggtgctggtccccgagagggcggcgagaaggacggaggtagaggttactcacacggctcggcgggtgcggcccggctcagcgctctccgctctctctagctcctcgcgcagtcttaacagcaaaactctactgagctcggacgaaactggcgggctcctgggccaatcaccgtgcagctccccgccagacgctggaccaatggttgtgcgcttgaggtctggcaaccgcctcccgcaagatatcaccgggtaatgtagtccttcgcgaccaagggcaggacagctggacggcgcacagcttcctgggagatgtagtccggctgctcgcgggcgcgcgagttcgaccgacgcgttagaaggaggtgccttgcgaagccgggctgcgaccttaggggtcgccgtgctctggcgtgtgactcgaaagtcagcctgcaggcggggtccaaggttagggcgcggtagacttgacccgctttcctcaaactctgttaatgccagaacccggataatctcaacttggtaaagatggcaggaagcctagcaaaaagctggaggacgtcgggaagagaatagatgagaacagtcccctcggggacggggaaggcaaaaacacgagtgtccccccctctcaccccgagttttagtatttctcattataaaagtaatattaaaagtatatagacagaaaatatagaaaggaaggaggaaatgactcatcctaccgcccgcacacaactagcgtcacggttttgcgcgacagtattgcctcctgactttttaattgcatttttatattcgtgttatcattttgacgcacaattttaagacatttttattgtagaaaatttcaagatacacagaagtggaataacccgatgaagccgcgtagagtcgctctccgacctcagcagttacgcgactcatggggcaatcttgtttcctctatttctgcacctacctcgcacgcgctgcccagcgttattctgaagtaaataccatcacgtgttttcaccagtaaatatttcagtatgtgtctttaaaggacaagcattccctttttaatacgtatacattatgcttcacacacacacaaaactgtcactccgaccccccaaaaaaacttttaatatcaaatatgaattagtgt[132 bp omitted]tgcaacctttgcctctggggttcacacgattctcctgcctcagcctcccgagtagctgggattacacgcgtgcaccactatgcccagctaattttttgtatctttagtagagatggggttttgccatgttggtcagtctggtctcaaactttttttttttttttgagacaagagtctcactctgtcacccaggctggaatgcagtggcacgatctcggctcggtgcaacctccacctcccgggttcaggtgattctcctgcttcagcctcctgagtagctgggactacaggcctgcaccaccatacccagctaatttttgtagttttagtagaaacggggtttcaccatgttggccaggctagttttgaactcctgacctcaagtgatccacccagctcggcctcccaaggttctgggattacaggtgtgagccaccgtgcctggctgaaatgtccttcttaaaacaagttgtttgcttttctttcttttttttttgagacggagtctagctctgtcccccaggctggagtgcagtggcgcgatcttggctcactgcaagctccgcctcccgggttcacgccattctcctgcctcagcctctccaagtagctgggactacaggcgcccgccaccacgcccggctaattttttgtattttt[133 bp omitted]ctcagaaaacaaacaaaaatgtttgtctgaattgagatcttggttgggtgcagtggctcacacctgtaatcccagcactgggaggctgaggtgggtggattgcttgaggtcaggagttcaagaccagcctgaccaacatgtgaaaccgcgtctctactaaaaatacaaaaattagccaggcatggtggtaggcgcttgtaattccagctacttgggaggctgaggcaggaggatcacttgaacctgggagggagaggttacagtgagccgagatcgtgccactgcactccagcctgggcaacagagtgagactccgtctcaaagaaaagaaaaagagttgagatctgaactgaacattgcaactggaagtccttttaaaaatctattgtttttctccactttactttttttttacttgaaatttgttttctttcatttcctttcattttcctttctttctctattttattatatttgtttttttttaagaaactagatagagccaggctgggggtgcacacctgtattcccaatattagggagactgagggaggaggatcccttgagcccagaagttcaaagctgtagtgtgcaaaaatagtgcctgtgaatagccactgtgctccagcctgggaaacatagcgacactccatctctacaaaaactaaataatacattttttaaaagaaagaaattaagtggtttatgctgtggcattttccctagtctggattttgctgatcgcatccccatggagttgtttccacatcttcctgtgtcccttgtgttttttgtttgtttgtttgttgttgttgttgctgtttttgagacaaagtctcactcagttgtccaggctgtggtgcaatggtgcaatctcggctcactgcaacctgtgcctcctgggttcaagggattctccagcctcagcctcccaagtagctgggattacaggcacccgccatcatgtccagctaatttttgtatttttagtagagatgaggtttcaccatgttggccaggctggtctcgaactcctgacctcagctgatctgcctgctttggcctcccgaagtgctgggattacaggcgtgagccaccacacctggcccctatgtcccttgtgttctctgctaattggtaattagatctaaaaggtttgattagactgggtttgactttttttttttttagataaggtctcactttgtctcccaggctagagtgcagtgacacgatctcagctcactgcagcctctacctcttggggtcaagctatccttctgcctcagcccctagtagctgggactacaggcacgcgccaccacacccagctaattttttgtattttttgtagagacggggttttgccatgttgcccatggcagtcttgaactcctgagctcaggcaatctgtctgcttcagcctcccaaagtgctaggattacaggtgtcagccactgaacctggcctgatttttaaaatttatttctttattttttgagacagagtctcactctgtcctccaggctggagtgcagtggcgcaatcgcagctcgctgcaaactccgcctcctgagttcaagcgattctcctgcttcagcctcctgagtagtcgtgattacaggcatgtgccacctcgcccagctaattttcgtatttttagtagagacggggttgtttcaccatgttggttgggctggtctcaaattcctgacctcatgatctgcccgccttggcctcccgaagtgctgggattacagacgtgagccactgcgcccagcctttttttttttttttttttagacagaatcttgctgtgttgtccaggctggagtacagtcatacagtagtgtgatcttggctcactgcaacctccgcctccagggttcaagcgactctcctgcctcagcctcctgagtagctggtactacaggcacatgccaccaaacctggctaatttttgtacttttagtggagatgacgtttcaccacattggccaggcttgtctcaaactcctgacctcaagtgatctgcccactttgcccttccaaagtgctgggattacaggcatgagccactgtgcctggcctgatttttttttttgtaaagacagtctcgctctgttgcccaggctggagtgcagtggcacaatcttggttcactgcaacctctgcctcctgggttcaagcaattctcttgcctcagcctcctgagtagctgggattacagatgccctccaccatgcccggctaatttttgtatttttagtagagatgggatttcaccatgttggtcaggctggtctcgaactcctgacctcaggtgatccacctgcctcagcctcccaaagtgctaggattacaggcatgagccacggcgcccggccaacgttttttttttttttttttttttttttaaatgagactacttacatggtgttgtgtatttccatgaggaacaccataatgcctgcttgtctgtcattttgtgatgtttgcagccatcgtgtctcaaaaaagaattggttcctggccagatgcggtggcccacacctgtaccagcactttgggaggccaagctgggttggtcatcttgaggtcaggagtttgagaccagcctggccaacattgtgaaacccctgacctcaagtgatttgcctgcttcagcctcccaaagtgctaggattacaggcatgagccaccgtgcctggccttaatttttggtagagacagcataggatctccctatgctgctcaggctggtcttaaactcctgggcctcccaaagtcctgggattacaggtgtaagccaccatgcctggcctttaccaaagaaatctttgcctagtcaaaggttataaagattttctcctatgttttctaatagaaattttatagttttaggttttacatctaggtctctgatccatttttagttattttttgtttggtatgagatattgaaggtttttttcttgtacttggatatttaattgttctagtacatggaactctgtttttgttgaaaagtctattctttctccactaaactgctctgttcatgtttgttgaaaatcagttcatgtgtacacaaaatgatgaccttttttcttttttcactcaatgcaagtaatgataagcattgtccacacaggaaaaagatagttaaaggtgttgccgggcacgatggctcacgcctgtaataccagcactttgggaggccgaggtgaatgggtcacctaaggtcagaagttcaagaccaacctggccaacatggtgaaaccccgtctctactaaaagtacaaaaattagctgggcatggtggcaggtgtctgttatcccagctactcaggaggctgaagcaggagaatcacttgaacccaggaggcggaggttgcagtgagctgagatcacactactgcactccagcctgggtggcaagagtgagactccatctcaaaaaaaaaaaagatgttaaggtgggcttggtgcagtgactcatgcctgtaatcccagcactttgcgaggccg[134 bp omitted]gaggcaggagaatcacttgaacctgggaggaggaggttgcagtgagccgagatcactccactccagcctggacaacacagcaagactccatctcaaaaataaacaaaaataaataaataaataaaaataaagatgttaagttggcccataatgggcagaacctaaaaaagaaatttgacttcctgttctagtcgaaagcgtccctcactgtggtcttccgggctgcactgtcctccctcactccctctgtctccttgcttagggattgccttatttccccatgcaagtgcagccctcatgttttatctctgttgtccaggtcagtttgtgaactgattgctaacctctttccagatcatctctttggctaaggagatctttggccctactttgttttcctgaactagagcaaacccacattttagaatgggcctcttcaaaggccaatcagcagataagccaggaaggacctttgactacaggctaattgtagggtgacttagacccagggcaccacagatggtcagaactggaaagattcatggaggtcatttcatctggccggggcccagaaggactaggagatgtgcctgcagtccctcaaggtcaggtggcaaattggtggctgggatgagatgagactggaggtagatgctagttttcctgggctgacccggattgtagtttttatatatttcaaatttggccatttcattttaagttaaatatgtttagtaaatctgaaaagagaaaccagaaagtaacggttcccgtcagcttggggaagtgaatccttctgtgacttcaccaacacttaccctaaagaggcctataaaaagctcctttggacttcccccgcctcctaagaaggagtaaatatctccttggccttgaccaaatagagttggtatttagcagctgcttgagctgatgcttctgaggcaaatgagtctcttaacatctaactgagttggtcagctctctgtaagaggcctgaaagtcagaaggcaacttgctgtgtgtctctggcaagtaactttccttctctgggctgcagttccttcatctgttcagatggagttggactacagggtaggtcaagccttgctgcctctgcacctccacagttctaaaatataatctgcatttttttttttttttgagacggagcctcgctctgttgcccaggctggagtgcagtggcgcaatctcggctcactgcaagctctgcctcccgggctcaagccattctgcctc[221 bp omitted]tcactatgttgtccaggctggtctcgagctcctggccttaagcaatcacctcgcttcagcctcccaaagtgctgggatcaagggtttgagccaccatatgcctggacttaaaaaaaacaacaactcatcaaatattgagggcctgttttggccagacactgttttagatgttggagattcagcagtgaatcaatcagaattcttgccctcttggatcaggctttctttcactcagcaatatgcagctaaggtttttccacaatttctcctggcctgatagtgtgtttctttttggtgtggaataacatttcattgtgcggttccagcacacagtttg[132 bp omitted]aaacccccgtctctactaaaaatacaaaaaattagctggacgtggtggtaggcgcctgtaatcccagctacttaggaggctaaggcaggagaattgattgaacctgggaggcggaggttgcagtgagctgagatcatgccattgtactccagcacaggtgacagtgcgagactccgtctcaaaaaacccaaaaaaacaggacatcttagttgcttccaagctttagcatttatgaataaagttgccataagccttcatgtgcaggtttttgcatggatataaatctccatcattttattttattttattttatttttaaatgagacggggtgtgcccaggctggtcttgaactcctgacctcaagcaatccacccaccttggccttccaaagtgctgagattacaggcatgagccactatggccggccttcattttattttttaaaacttaatagagctaaagggctgaggaaataatgagaagccaaccactgatggaggattctggaggaagttctgataggctgcaagccccaaagataggggcaccttggcaacagttcctttttttctttgttctttcagatttactcagcaaatgactcaaacaccagtaaactaaaataaaaaaaaaaaagaaagaaagaaagagaggattcactgtccagtaactttcaatagctgatttcttacccattttgactttcttctgttgctcttctcaggggagtcaaacatcaagaggctacagggcgccgggtgcggtggctcacgtctgtaatgccggcacttcaggaggtcgaggcgggcggatcatctgacgtcaggagtttgagaccagcctggccaacgtggtg[133 bp omitted]gaaaccccgtctctactaaaactataaaaattatctgggcgtggtggcacctgcctgtaatcccagctactctggaggctgaggcaggagaatggcttgaatccgggaggcggaggttgctgtgagctgagatcgcgccattgcactccagcctaggcaacaggagcgaaactccgttgtttcgctacaggaaattccaaaaagaggctacaggaaatgtcaataccaggccagagaagaagggttcccaagtttgctggagggtctcaaggcttccagctttgtggttttcggcatttggttctctttgaccagatcatcaactgttgtgggtgaccacgcctcctcactcatcacctgt[131 bp omitted]tgaaaccccttctctactaaatatacaacaaaaattagccaggcgtggtggaaggtgcctataatcccagctactcgggaggctgaggcaggagaatcgcttgaacctgggaggcagaggttgcagtgagccaagatcacgccactgcactcgagcctgggcaacaagagcgaaaatctgtctcaaaaaataaaataaaaggaatttttgctgtgtctgtgggaagcccatcttcaccctgcctgccatcaaatgcacacagagaacagagtgcagccctgtcgtgaaggtagaggtgtctgtgtgtggaagggttgacatgtcccacatccaccgcaaaccatgtcttcttttattttttattttttgagacagagtctcgctctgtagcccaggctggaatgtagtggcagcggttttggctcactgcaacctctgtctccaaagtttcagcagttctcctgcctcagcctcctgagtagctgggattacaggcacgcgccaccacacccagctaattttttattattagtagagacagagtttcaccatgttggcaaggctggtctcgaactcctaacctcaggtgatctgccttcctcggcctcccaaagtgctgggattccaggcgtgaaccaccgcgcctagccacagaccacgtcttcttccgtgacaatttacggttcctgactcaaggatgactacctctcccagcactttggaaggctgaggcaggaggattacttgagcccaggagttcaagaccagcctgggcaacaatagtgagactttgtttctaccaaaaaaaaaaaaaaaaaaaaaccgctggatgtgtggcacgcgcctgtagtcctagctccttgggaggctgaggtggaaggttctcttgagcctgggaggtcaaggctacagtgagccaaaatcatgccactgcactccagcctgggagtgcaggaccccgtctcaaaaacaaaaaatgggccgggcgaggtggctcacgcctgtaatcccggcactttgggaggc[135 bp omitted]gaggcaggagaatggtgtgaacccgggaggtggagcttgcagtgagctgagatcgcaccgctgcactccagcctggatgacagagtgagactccatctgaaaaaaaaaaaaaaaaaaaaagttgactacttttgggagctccaaatctaagaagcaggctatgagaaaatgggcctaaagcctcctcaaatccatagcaaatcaggcagggtggtcatgtcattactcccaagacagaaacagattttctcctgtcccagtattgatacatttctttccactgggcttttcctgtatttaagtgatgtgtttttgtttttaacacaattataatcctactgtacatgtaagattatgcgctttcatttaacattgtactatgatgatgttttccatgttttttaagtttttcataaagtataacttttgttggttgtatcacaatcttttttttcttttttgagatgagatcctcctctgttgcccagtggcagtgcagtggcatgatcacgatttattgcagccttgacggcccagactcatgcaattctcccacctcagcttcctgaataactgggaccacaggtgtgtaccaccatgcctggctaatttttattttattatttgtagagatgaggttttcctatgttgtccaggttggtctccaactcctgggatcaagcaatcctcccgtctcagccttccaaactgcttggattacaggcatgagccactgcacctggctcataatgatttttaaagcttatttgtattaagatataattcacataacattaaaaaacatcaaaaaactgtatgtttaaaaatatacagcttcgtggggtttgtttagtatattgtgcaatcatcaccgctatccaattccagagctttttttttttttttttttgagacagagttttgctcttgttgcccaggctggagtgcagtggtaccatcttggctcgctgcaacctccgcctcccagcttcaagcaattctcctgcccctgcctcccgagggtggggagggattacaggcacccgccaccacatgaagctaattttcagatttttggtagagacagggtttcaccctgttggccaggccagtctcgaactcctgacctcaagtgatccacccgcctcggcctccccaagtgctgggattacaggtgtgaaccactgcacctggccagcaccatcttattaatacattcccaccagcgaggtctgcggttccagtttctcgccatccccgctgacactcgatgttttttctttggtggatgctcacatgcttctgcatgagcctttttccctcctttccccacgcctcagttctggagtcaccgtctctctgaagtctctcctgaccccatccaagtcggcctcccctctgctctccttgccccgctgccttctgggatggattactgctcagtatctgccacggtatctccggcttcctgagggctggtgtttggtaactttcttatgcatctctgtctccagcacctgggcctgtgttcgacggctcagtagacactagagtgcagggatggagatgacacaccacccagcatggctcagagtgaagtgatttcccccttccacatcctcatctgcctccaccccatgaaagtatttatagacagggaatcgtgggagtggagaactacgtacgtagcagggttgagtagagaaagatgggaaatgtccacagacgtcttttctttgctcccctttgcggtggggattctggagatgtcagggactgtggggattggctgcttggtaggcagacatgaatgatggggtatcaggactagattcagctgccctgaaagtgacagagccccacaatagtggcttgaattcatcaaagtccacagtaagctcaccagggctggttcagccactgtctccatcaacttcccaggagcagagcactggccccttccagcccaccatgccacaacccttagggcagaaggacccaacccagtacgggtctgtggcctgtaaggagctgggccccacagcaggagatgatggcgggcgagcaagcattaccgcctcctgtcagatcagcggcggcactagattctcacaggagcacgaaccctacgtgaactgcgtacgcgagggatctaggttccacgctccttatgagaatctaatacctgatgatctgaggtggaacagtttcatcccaaaaccgttccccctccaccgtgggaaattgttttccatgcaaccggtgacaaaaaggttggggaccgctgccctagggtgtggccatcagtgtcagcagccagagctccagacatcacatgggtagtgaagcaacaggatggagacatgattgcaagagaaaggggttccaggaaggttatctggggccgtcatatgaaaattttacttgaatcctattggccagagctgagtcacatggctgcacctaaatgtcagtagctgggacaggtggtctttactctgggtagtc[212 bp omitted]gaggcaagagaattgcttgaacccgggaggcggaggttgcagtgagccaagattgtgccactgcactccagcctggatgaaagagtgagaccttgtcaataataataataattgggcattttcctactatggaagaagaggggggaaggtggcagaaaacatgtctgcccagatggatagatgaagagaaacatctattgaggaagtatatgattcctctggcattaggctggatattttattttattttatttttccagatggagtttcgctcttgtcgcccaggctggagtgcaatgatgcgattcgggtcactgcaacctccgcctcctggattcaagcgattctgctgcctcagcctcctgagtagctgggattacaagcatgggccaccaggcctggctaattttttgtacttttagtagagatggggtttcaccatgttggtcaggctggtctcaaactcctgacctcaagtgatcaacctgcctcagcctcctaaagtcctgggattacaggtgtgagccaccgtgcctgtccaggctggatattatatacattagccatgtctcccaaaaaccctaggaggccaacatcacattccatcatactgctgaggaaacaagctcagaggcatcagccacctcgcccaaggtcacataaccagcaggatctggagctaggaccaagaacccagttctgtgggattttttgtgcacctcccccactgccaaattcatactttgaggccctaaccccacaatgcaatggtgttatcagtttgttctccctgctataaaatacctgagacttggtagtttataaaggaaagaggtttaattggctcatggttctgcaggatgtacaggaaacatggctggggaggcctcaggaaacttacaatcatggtggaaggtgatggggaagggacatcttacactgccagagcaggagaaagagagcgaagggagaggtgctatatgctttttttttttttttttttttttttttgacacggtctctgtcgcccaggctggagtgcagtggcatgatgttggctcactgcaacctctgcctcccaggctcaagcgatactcccacctcagcctcccaagtagctgggattacaggcgcctgccaccacgcctggctaatttttgtatttttagtagagatggggtttcaccatgttggccaggctagtctcaaactcatgacctcaagtcatctccccgcctcggcctcccacggtgctggcctggctgccctgtgttttgagatcatgctcctcacccatctgcactttgagttctacagctgagggggagaggtcttcttcccatggattacttttctcaggctgcaaaagtgtttggaagagcagccttatggtcagaaggcatttgaaaaacaacttatattccttactcacaacaaaatagtttttatttgtttttttgagacggagtctcacggtgtcacccaggctggagtgcagtggtgcgatctcggctcactgcaacctccgcctcctgggttcaagcaattctccagtctcagcctcctgagtagctgggactacaggtgcctgccaccacacccagctaattttttgtatttctagtggggatgaagtttctacatgttggccaggctggtcttgaactccagatcttaagtgatacacctgcctcagcctcccaaagtgctgggattactggtgtgagccactgcgcctggcctatttgctcctttaatgaactttcgtcttcactagtggtctcaggacaagcagagcaggcagtggaagagccttggagctcacctggccatcggtttaaatgtgccatttagacatgatttcttgaggccaggtgtgggggctttcacctgtagtcctagcactttgggaggctgaggcaggagaattgcttgaggccaagagttcaagatgaacctggccaacatagcaagaccctgtctctaaaaaaagaaaaaaaaaagacacaattttgtctgtatgagatcaaatgccaaaccactgcacacagacaagtaattcagtagggaagtgagatcaacatttgtacagagaaatcaataccttcccatagacaaatgacagctagctagaaaatgggaggccgggcatagtggctcctgcctgtaatcccagcactttgggaggctgaggtgggcagatcacttgagctcaggaattcaagaccagcctgggcaacatggcgaaaccccatctctacaaaaagtacaaaaattaggtgggcatggtggtacttgcctatagtcccagctactcaggaggctgaggtaggaggattgcttgaacccagagggtcgaggctgggatgagctgtgttcacaccactgtactctagcctgggtaacaaaatgagaccatgactcaataaataaataaatagatagatataaatttaaaaacaaaaataaataaattagctgggtgcagtggcacatgtctgtagtcctagctacatggaaggctgaggtggaaggatcacttgagcccaggaggtggaggtttcagtgagccatgatcacaccactgcactccagcctgggtgacagagcaagaccttatctcaaaaaaaaaaaaaaagatggaagaagataaggtctgctttaaaatatcaacaaagatgataaaatatctgggaacaaatgtcacaagaaacatgcaaaatctccataaggaaaatgttcccaaaggacatgaaactggaaagacatggcaagtcctcggatagggagactcaacatcacaaaacgccagttcttcttagtttacaaatttaacatgatccaaataaaaacaccaagagccttttttctggaaggaaacaagctgatgctaaagtttacattgaaaatataaacaaggccgggcgtggtggctcatgcctgtaatcccagtactttgggaggctgaggcaggcggatcatgacgtcgtcaggagttcaagaccagcttggccaacatggtgaaacttcatctcctctctctctttttttttttttttgagacggcgtctcgctctgttgctcaggctggagtgcagtggtgcgatctcggctcacttcagcctctgcctcctgggttcacgccattctcctgcctcagcctcccaagtagctaggacaataggcgcccactaccacgcccagctaattttttgtatttttagtagagatggggtttcactgtgttagccaggatggtctcgatctcctgacttggtgatccgcccgcctcagcctcccaaagtgctgggattacaggcataagccaccgcgcctggccgtttttttttttttttttgagacagaggcgtgctttgttgcccaggctggagtgccatggcgtaatctcagctcactgcaatctctgcttcctgggttcaagcgattctcctgcctcagcctcctgagtagctgggactataggcgtgtgccatcacacctggctaatttttggatttttagtagagacagagtttcaccatgttggccaggctcgaactcctgacctcaagtgatctgcccgccttggcctcccaaaatgttgagattacaggtgtgagccaccatgccggctggtgaaccccgtctctacaaaaatacaaaaattagccaggtgtggtagcgggtgcctgtaatcccagctactcgggaggctgaggcaggagaatttcttgaactaggaagtcagaggttgcagtgagccgagatcacgccattgcaccctagcctgggcaacaaagcgagattccgtctccaaaaaaaaaagaaagaaaataaaagataaacaagaagagccaggacatactgagaagagcaatgggaaaagaatggccgatctgacatcagaaacttagtgtgccgcactagcccacgggcagactgcagagtaacagaggcccagaaacaggaccccagtatacagaggacatggacactcattatacagaacgcacctgctcgcagggggctgccgatggacctgtgagtaaatactatctggacaagcgtgtagtcatctggaaaaaaggagagctgaatccatctctcacactgatatcaggatacctttaaacggatcaaagatttaaacaggccaggcgcagtggctcacacctataatcctagcacttgggaggcctaggtgggtggatcactggaggtcaggagttcaagaccagcctgggcaacatgatgaaaccctgtctctactaaaaaatacaaaaatcagccaggcgtggtggtgcatgtctgtagtcccagctactcgggaggctgaggcaggagaatcacttgaacccaggaggtggaggttgcagtgagctgagatcgtgccattgcccctccagcctgagcaacagagcgagatccgtcttaaaaaaaaaaagaaagaaaagaaaatacagatgggtgtggttgtaatcccaacactttgggaggctgaggtgagagatcacttggagcctaggagtttgagaccagcctgggtaacatagtgagacctcatctctacaaaaaatataaaaattagctgggtgtggtggtgtgttcctggagtcagctacttgggaggctgaggtgggaggatggcttgagcctgggaagttgaggttacaagagctgtagttgtgtcactgcactgcagcctggatgacagagtgacagcctgtctcaaaaaaaaaaaaaactgtaaaaccaaaaaacaaaaatctatgaattattttgcactcggtaagaacagaataagaatcatggataggcacagggctgaccagaagctggctgaactcaaaatgatttaccagatgtgggcactagcatagattaacccatcttgtgctagttacttaatacaccttatcctgtgtaatcttataac[132 bp omitted]tcagcctcccaaatagctgggattattactgcatgttccaccacacccggctaatttttgtggctttttttgacaggcagtctctctctgtcacccagactggagtgcaatggtgcaatcttggctcactgcaacctccgcctcccagcttcaagcaattctcctgcctcagcctcccaagtagctgggattacaggcacctgccaccatgcctggctaatttttgtatttttagtagagacgtggtttc[132 bp omitted]tttaccatgttgaataggctggtcttaaactgacctcaagtgatccacccacctaggcctcccaaagtgctgggattacagaattgagccactgtgcccgcaggaggatggaggaagggaggatggaggaagggaggatggaggaagggggcaggcagttgggatttcgagactgcaggggagcaagagccccctgggagctgatcaggaaggggttctcaggagatgtggggtctgtagatctagttcttatgacaggctggggataagcagagagcagagaggaggagctgaaggttagttagagaggagaggacagcggctggggcagaggtggcctgtgagtaaatactatctggacaagcgtatagccatctggaaaaaaggagagctgaatccatctctcacaccgatatcaggatacctttaaatggatcaaagatttaaacaggccaggcacagcggctcacgcctgtaatcccagcactttggagggccagtgcagggggatcgattgagctcaggagttggagaccagcctgggcaacatggtgaaaccctatcactactaaaaatacaaaaatttagccggacatggtggtgtgtgtctgtggtcccagctacttgggaggctgacgtggtaggattggttgagcccaggaggtggaggttgcagtgagctgaggttttgcctgtgatctgggagaaaggtagatgctgaccaaaggcaaagactcagaagggatttggttggccaaaggcttggagaattggaccaggtgcagactgtatgagatcttgaatgccaagatcctaatcagcacctgtcacgatgtacttaatcgttgcagttgcaaaacacccgtgtacataatcacgttggatcctcagagcaacctagggacattttccttggtttgatttttaaacagatgaaggaatgggggtgagaggttaagggccctggtcgtggccaggcgccatggctcacgccagtaatcccagcaatttgggaggctgaggtgggtggatcacttgaggccaagagttcaagatcagcctgggcaacacagcgaaaccccgtttctattaaaaatacaaacaaccagccagacatggtggaacgtgcctgtaatcctaactcgggaagctgaggtgggagaatcgcttgaacccgggaggcggaggttgcagtgagctgggattgcatcactgcactccagcttgggcgatagagtcttgctctgtttcaaaaaaaaaaaaaaaaaaaaaaaggaagaaaaaaggagaaaaagggggccctggtcacacagcgaggaataaaggccctggcctcaggcctgcgatctcatgctctttgtcctacatcacactgctcctgaggggcaggagcctggactttgccctctttggacaggctggggaaagaggcagggtggagagacaggaggaggttttgtggcagtggggagagggggacgaagggccgggaccaggatggtaccagggagcatttccctgcagccctgtccctggagccctgtggcgtccctggtgctgtggactcttggctcacctcctgccgctctggcctctctcctgtgtgcttcctgccttcccctcgcccagccctcagggctgtgcttccttatggggactggagtatgtgaggcctcacccgtggccatggtttcagggccacctccacactgacaacacctggatctcgatctcctgtcagatctgtctcctgagctccaggtgaacacaccctgctgctttctagatgattgtcctcaggcacctcaaatccaaccctccagcctttctctctgcttcaccccaccctgcccctcttcccctagttccccatctcaacaaacaaaagccacagatccccccactgccctgcagccatctggacctgcctttccctccaccccaggtcttcccagctcctcctaaatacagctcaacgcccttggccctctgccactcccttcactgggacaacatcagcagtttctttattttttttagacggagtctcactctgttgcccaggctggagtgcaatggtgtgatcttggctcactgcaacctccgcctcccgggttcaagtgattctcctgcctcagcctcctgagtagctgggactacaggcacacgcaaccacgcctggctaatttttgtatttttagtagagacaaggtttcaccatattggcccggctagtctcaaactcctgacctctggtgatccacccacctcggcctcccaaagtgctgggattacacagctggctaatttttgttatttcttgtaggggcaaggttttgccatgttgcccaggctggggtatatggtttcttttggggtatgacagtgttctaaaatggattgtggtggctggcacagtggatcatgtctgtaatcccagcactttgggaggccaaggtgggagggtcgcttgaggacaggagtttgagaccagcctgagcaacatagtgagaccctgtctctactaaaaaacataaaataaaatggattgtggtgatgattgcataactgtgaatactaaaaaacattgaataatata[161 bp omitted]cctgctttagcctcctgtgcagctggaattacaggcgtgggccaccatgcccggctaatttttgtatttttagtagagactgggtttcaccaggttggccaggctggttgtgaactcctgacctcaggtgatctggccccctcggcctccaaaagtgctgggattacaggcatgagtcaccatgctcggcctaaaatcttcaaaaaattttaaaattcgctaggtgtggtggtaccacctgtagtcccagttccttgggagattgaggtgggaggatggcttgagcccaggagtttgaggctgcagtgagctatgatcacaccactgcactccaggctgggccatggagcaagactcttgtctcttaaaaaaaaaaaaaaaaattggctgggtgcggtggctcatgcctgtaatcccagcactttaggaggccgaggagagtggatcacctgaggctgggagttcgagaccagcctgatcaacatggagaaacccccgtctctactaaaaatacaaaattagccaagtgtgatggctcatgcctataatcccagttactcgggaggctgaggcagaagaatcgcttgaacccaggagctggaggttgtggtgagccgagattgcaccattgcactccagcctgggcaacaagagcaaaactccgtctcaaaaaaaaaaaaaaaaaaaaaaaaaaggctgagcacagtagctcatgcctgtaatcccagcattttgggaggccg[134 bp omitted]gagaggccaaggcaggtggatcacgaggtcaagagttcaagaccagcctggccagcatggtgaaaccccatctgtactaaaactacaaaaaaattagctgggcatggtggcatgcctgttgtcccagctactcgggaggctgaggctgaagaattccttgaacccggcaggcagaggttacagtgagccgagattgtgccactgcactccagcttgggcgacagagtgagactccatctcaaaaaaaaaaaaaaaaaaattaggcaaggtggcgggtgcctatagtcccatctactcaagaggctgaggcaggagaatcacttgaacccaggaggcggaggttggagtgagcagagatcgtgccactgcactccagagtaagactctgtctcagaaaaaaaaaaaaaaaaaaaaaaaaggccaagtgtggtggcttatgcctttaatcccaacactttgggaggctgaggcgggaggatcccttgagtgcaggagttcaagactagtctgggcaatatagtgagaccccatctctgtgaaattttttttaattagctgggcatggtggtgcgcacgtccagctactcgggaggttgaggcgggaggatcacttgagcacaggacttcaagcaagcagtgagctatgatcatgccactgcactccagcctgagacaaagcaagacttcgtctcaaaaaaaaaaaaaaaaaaaaaaaaaaaaagacattcagagagaaattggcttgtcctatgcagctaggtctggagagtggggttcgtgccgaagagccagccccatctgtaaggagatggcgcagatgctggtcttacgaaagctgtcactgctgcttccttctattttagatgacaagcaattctacttccttttccaaaacctcatatttttttcttttcttttttttttttttgagacagagcttcactcttgttgcccaggctggagtgcaatggcatgatcttggctcaccgcaacctccacctcctgagttcaagtgattctcctgcctcagcctcctgagtagctgggattacaggcatgcaccaccatgcccagctaattttgtatttttagtagagatggggtt[146 bp omitted]aggtcctatccccagcattgtccctggataggcagtgtggctgctgtaacagacaaccctcctccccccgtcagtgatgcaacacagctgatatttgtttcatttttttgagacgaggtctcggtctctgctgcccaggctggagtgcagtggcagaatcatggctcactgtagcctcgaccttccagactcaggcaatcctcctgcctcagcctctttgagtagctgggactacaggagcacaccactgagtctgtctaattttttgtagagacagggtctcactatattgccagactgttctcaatctcttgggctaaagtgatcctcccaaagtgctgggattacaggcatgagccactgtgccccgccccagacatgttccaaatctagcaggtgctctgggtcttctgctggctctcctgcatccacccacaggcaagagaagcaacaaagtggggaggccacaaggccccaaacacaccacacacgtcaggactggagcacatggctgcttggaactgcagggaggttgggcacatggtccagacaactggtcgggagagagccaggtgagcactgcgcacactctgctgcagagcctgacttcactcagctaacacgaccctagcctcttccaggctatccggattctggtctccgcaccactgcaagtcagatgttcctaaaacttatctttcatcgtaccgctgatctataagagctacagaagcagccaggcatggtggctcacacctgtaatcccagcactttgggaggctggggcgggtggatcacctgaggtcgggagtttgagatcagcctggccaacatggcaaaaccccatctctactaaaaatacaaaaattagctgggcatggtggtgcacacctgtaatcccagctactggagaggctgaggaaggagaattgcttgagcccaagaggcagaggttgcagtgagctgagatcgtgccacggcactccagcctgggtgagtgagactctgtttaaaaaaaaaaaaaaaaaaaaaagctacagaagcctcctgtgtcaacaggcagaatgggcatcgctcagcctgcattcgagtcccccacaaaccccacctgggctctttcttcctcgttgcaggaggctactcaggctccctcaagccatgtccaggcaggtgctcgctaacaccgccacgcctctactagaccacctgctctgggtgtctactgtcctattagtaactgtccaaactcatttcacccaatccccagggcaagtcccatctgcctccaagcctccctttgagcctgtgctgtctacatttcctctttgagtctctctcatgcaagggcttgcataatacaaggatcaggactgaagagtgcgtctgtgtcaaggacagaaggctccagtggggcagtttccagtttcagggtgactcagggcagcaatgccaccgtgcaggaatggaaagcggtggttgatggtgtgagaagacacgggggccctcctcagcctccagttagaggggagataattgcctccaattccacacgccccaggaatgacgttcaccatcaatccctacaggtgtgggcaacacatgtgtaacagagtaaatgaaaaagggtacaccctcgccccttgcttccctagcacagcgcaggatgaggggtggggttacagcaggaggcaaacatccaccctttcaccccaggctcgggcccttgcacaggcctgcagcacgaggcgagccctcaggacctggcagctgctattttggaggccaacactgctgacgccacgactcacactcagagaatggctgcaatagctgtgctttctcaacccgaatccaggaatgttaaaaaaaaaaaaggctggggcagggcctggtggctcacgcctgtaatcccagcactttagaggccaaggtgggcagatcacgaggtcaggagatcaagaccatcgtggccaacatggtgaaaccccatctctactaaaaatacaaaaattagctgggtgtggtggcgggcgcctgtagtccgagctattcgggaagctgaggcagcagaatcgcttgcacccaggaagcggaggttgcaatgagctgagatggcgccactgtactccagcaacagagccagactccaactgaaaaaaaaaaaagaaaaaagaaaaaaagaaggctgtccttggagacctaagaccagtgttgctcttgggtgggccagagttgagacttaaaatacgtcttagtgatttcttttttggacggggtatagtatggcttttagtgttagttttaaaagtagtgtttggaatgcactaagcagtaagtggcttaatcaatatcactaacatgtaatattgatctatcagtgctgttggcacacagaattgtactcttttttttttgagacggagtctcactctgtcgcccaggctggagtgtgatggcgcgatctcggctcactgcaacctctgcctcccgggttcaagcgattctcctgactcagcctgccgagtagctgtgattacaggtgcccgccaccacgcccacctaatttttgtatttttagtagagacagggtttcaccacgttggccaggctggtcttgaactcctgaccccaggtacaaaaattagctgggcgtggtggcaggagctggttatcccagctacttaggagggtgaggcaggagaatcacttgaacccgggaggtggaggttgcagtgagccaagatcgtgccactgcattccagcctaggggacagacggagactctgtctcaaaaaaaaaaaaaagaaaaaaaaagtatttccaagacgcataaaacaggtccactgtcattttttccagttatccaggaacttccataaagcgaacgttttgggctgaaggtcacccaccccatgaacagtcaggtggaactagtgcccagggaaggcaggcagcctgcgccatcatggcctttggctcagaggccacctaagcagccccgcgctgtgggtcaccatctcctccacactcaagtctgaaggtgagcctgtcaggggctcccagctcactgggtggagggaagcgtgtcagggaggggtggggggggcgtgccctgaagagcgaggccatgcgcctacctccagcttttcccctgacacactgagcgactcccggctgcacgccggccacagggctcctgtaagatgctgggaggcttcccaaggcaccccgcccagatgtcttcccaggaatcccggatccctgaggagggagataccatcactaagaaatctgtgaccaaactgctgatcacagaaaaggagtgattttcccattaattctgaaacagtcagtcaaacgcgagggaggggacaaattgagcaaaaagcctcaaatgaggctaaatgagtcaccacgcccggccttttcaattacatagctccattttgtaaacttctgctcagcttcaaggaggccagcccaagtggaccacaggactagcagtcttgactcttgctgggtcaagatccttcccacacatgactgctgcaggggaaggtcaaaaacgtcccaggccaggcacagctcacgcctggatttccagcactttgaaaggccaagggtggggggatctcttgagcccaggagtctgagaccagcctgggaaacacagaccccactgtacaaaaaaaaatgaaattagccaggtgcagtagcgtatgcctgtagtcccagctacttgggtgcagtagcgtatgcctgtagtcccagctacttgggtgcagtagtgtatgcctacagtcccagctacttgggaggctgaggtgatcacttgagcccaggggattgagtctgcagtgagctatgattgcaccgtagcactccagcctgggtggcagataaagaccctgtcacaaaacaaaacaacccacaagcctcccctgctcagtgtggctacaccaagaagaattcaagtcgagatttcttgggtattttttttttttttttgagagaggtctgtctctcaggctggagtatagtggcatgacagctcactgcaacctccacttcagcctcctgagtagctgggaccacaggtgtgcatcaccacactcagctaatttttggtagagatgggtttcactatgttgcccaggctggtgtggcattcttgagctcaagcaatccacccgcctcagcctctcaaagtgttaggattacaggcgtaagccactgagcctggcccttattacctttattttttattttattttatttttttgagagggaacctagctctgtcacccaggctggagtgcagtggtgcaatctcggctcactgtaacctccacctcccgggttcaagcgattctcctgcctcagcctcccgagtagctgggactacagacacctgccaccacagctggctaatttttgtatttttagtagagatggggtttcaccatgttggccaggctggtcttgaactcctgaccttgtgattcacccgcttcagtctcccaaagtgctgggattacaggtgtgagccaccctgcctgtcccctttttattactttttcgagacaaggtctcaccctgttgcccaggctggagtgcagtggtgcaaccacagctcactgtagtcttgacctcctgggctcaagtgatccacctcagcctcccaagtaatcctcactacaggcgtgcgccactgcatctggctaatttgctttttgtagagaggcagggagtctccctatgctgcccagactggcctcaaaactcctgggctcaagtgatcccccaccttggcctctcaaagtgctgggattacaggcatgagctaccatggccagacctcatttcttttttgttcagtcttctttgcctctgtagccaacgtgtgtgtaaatatgcctagtctcaccctaaaagcagcctattgagcaaacaagtatatttcagttactcagcatattaaaaccgtttcttcacaggtgtttctgtccttcttcttgtttaacacagaaaacaggagaaccaaataagccaagctctttatcttcccaaagcccttggtctagaccagagttcccaaagcgtggtcagtggtttctctacatcagaaacagcgggcgtgtctgtgtcctcaaaggcaatgtccgaggatgtggggcggggtttgcgattctgtattgttaacaggctccccaggagttcctgacagccaactgcaggcatcgctcccaggaaggcctgtgagccccacatgctcccctagggggatgtaagctgggtgatcacgtctgaaataaggacccaagattcctgactccccgatgcggtttttaaatttttaaggcaggcaaggggaaaaaaagataccaagtgaagaattcattgtgtatttattattcacagttaatcactacctaccaaatgctatccgcagagttaaaggattaagtacataggtctttatttaaacactgattttttttttaaatatatacacacaaaacttagttcagcaaggcttcatgatatacaccaattccaaaataaaacaatcaaatggtccaggtgtagaatgccagattccttttatcatctgcgaggaaaagagaagcaggatgaggaagagtgagggaaggcggggacaggctctgcccagaagagctgccgcctcctggcacagcaaacgctccaggcctgggccctgttcatatctggagtcggagggagactcccatcggccgctttgggactgaaaggcccaaggctgtcaccagctcccggaagagagggaggcagtcttgtttttgtcgtgggaaggggtttgggtggagaaaaagattacaggcacatcaccacaggggaccagaagtggagagaagacagagagttctgccgaggccttggtcttcctgtctttccaatcttgccttccccaactctccctgcttcctgggaccatcggtaggggtggggagcagcagtcaacacagcccactgggaagggaggcacaagcagcactccagcttcccagtgctgccctcacactcacctggacaggtcaggggacacaggatgaaagccatggcccaatctaagagcaagacaagtgaaaagtgagtactctcactgtgtaccccagcataggaatagtgaaacctgctacaactggaggctgcgttcccatgacttcctcctccgctctccttgtctgggacttgctggttccaggggtgcatatagggagggggcgggggccacaacccccgagacggtgaggacaggcttccgacccccctgtaagccagatccagtgggatgtgggagagctgggcggtcaccttccctcttgccccggtggcccatcacactcacactgcaccctgggcaagcagttccctgaacccccaaggggctcacaacccttaaagctggagcttaaagcctcctggcttagtacaagcaggagaacgcctcaccttccactcctgctttgtctcctttgctctaccctggctcccctgcccggagggaaaaatatttacacagagtaggagacaaattggctgaaaagctctggactgcctttaacttattttaaaacaaaacaaattaaaaaaaaaaaaaaaacaccactcagaagcaacccttgaaataaggaaaaaggcactatgaaaaaacaacatgctcgataatcccactggaagggccaacaaagtggaaagagacaggctttcaggtgggctttttttttttttttttgagacggaatctcgctctgtcacccaggctggagtacaatggcacggtcccggctcactcaacctccacttcccaggttcaagcgattctcctgcctcaggctcccaagtagctgggactacaggtgcgtgccacacccggctaatttcttatttttagtagagacggggtttcacc[140 bp omitted]ttccttctaccctactctactgtgaacttggacaaaatacactgggggtctgggctggaaggcagattcctacaagtcccctcctctggaggaagctaaacagcaaaggcatcgagcggccctgcccgctcctttttgtgtgtatatacgaagaacacaggaacagctgttcttctttcagtcattccaactaaaacagacattttgcatagagagaataccagcccacttggtttcttgttttttattattggcgtcagctaggactatacgtggccttaaacgtcatgcactgatggacagaagagaaaaaaggatgaaaaaaaagacaaaggaggggaaagaggagcagcagtgaaaatttgtaataaaaactcttcttaatttataggtaagttttggcatttttaaatccaacgccccctcccaccccctaaagttccaaccaaagtgagagggtcacagggtgacccggccaggtgttctgcactccctcacaggctgctgtcagaggcagcttgtgggtttaattcttttgtatgtgttttacatttttcactttctttaaataattgcttcttgactcttagacgttccggttcacgggggtgacataattgcggggaaacatgccggtctgcccgtggcaagctcctttccaccagttggggtctgagttatccatgacatggataaaatctccccggcggaagcccagctctccatcctcctggggatcaaagtcaaagagggcctggacgtatgtcggctgctgcaaaacaggagcaggaaaaacccacattgcattcctggtctgtgactggccacctccgaggccagatgggttccagggggaaacgaatgcgtgccaaattctccatgtttcttaaactcacctcccatctcccaaccccccgtttattcttacctattctaagtttacaggccaagcgggtttagtgtgatatttcccagtgctcagaaaatattagagtatgtctcccagaggagggtggccaactgtgccgtattatcaagtagagggcaggcagtgcttggaggagaaagttcttcagaaacagccatctgtgtttaggccgtgggcccagaatcgcaaatcccttctacgacacccttaaggtattaaagcctaaagttctggagctcgaataacataaggggctctaaccgtaacttacgaccagggctcgagggacaggaacgggtgccgaccccattccctcacaagcatagttttcctcataatttgcttccagggacaggatctttgggtgggtgtgttaaagaccatctccctagagaggctggcaagctggctacacactgcctctggaaaagcaaaaaccttgtatttgaaacaacaaatctttttttttttttttttttttttttgaaatgaagtctccctctgtcgcccaggttggagtgcagtggtgcaatctcagctcactacaatctccacctcctgggttcaagcaatttttccatctcagcttcccgagtagctgggactgcaggtgtgcgccaccacatccagctaatttttgtatttttagtagcgacagggtttcaccatgttggccaggctagtctcaaacacctgacctcaagagatctgcctgcctcggcctcccaaagtgctgggattataggtgtgagctactatgctgggccagaaaaaagaactctttagtgtgaatggagggtaacattttcagtaaggagcacagaagccccagcggcaatccctgaagggcgcccgcatgttgaggggcgcctcccctttcctacaggaatgcacactgaggagctattcttaactaaaaatgatcccatctcaccctgatgaggcttacctgtggcacctgttctatgtcccgcaggaatatctgctggtttctggagacagatgtagatctgtgataatccaccagctcattcaaagaattgaacttcaccacccagaggaagtacttcccggctccatctcggagcaccttgaagtgctgcacatcgtttccaaacctgggagggacagaaagcacatgtgaccggctaaaggctctaacttggcaaatcgagggtatttccatataggagctatctcgagagaaccactgtcccagcagcactcctcagggactgcagagcaacaagtttcctcactgggtgtccctgggacggacctctccctatgaatgatgggcaccaggacaacatccagaaaccagagagggacaggccatcagtcattctcattctgaagatgtttgtaagataaagagtccaggccgggtgcggtggctcacacctgtaatcccaacactttggaggccgtggtgggcagatcacctgaggtcgggagttcgagaccagcctggccaacatggagaaatcccatctctactaaaaatacaaaagtagctgggcatgatggtgcatgcctgtaatcccagctactcgggaggctgaggcaggagaatcacttgaacctgggaggccgaggttgtggtgagctgagatcgcgccattgcactccaacctgggtaacaagagtgaaactctgtctcaaaaaaaaaaaaaaaaagagtccatgtgccctgaaccctaccaaataaaaacagccgtacttaagacaaaggagtgtgacttaacatcctttgaataaaaaaataattaaaatcttatatgcaggaagaaggtgaggagggctggaaatactttcaacaattctctcgtaactgggaatagttcaaagtaatgttttccattcaggaattttagctccactcatggggaaaaggtctctgaacaaaaggacgtactgggacaataaaagaggcccagacttcaaaacccaaaagcttctccatcactagatcacacccttttatactggcaagcaaaaccggcaacagcgtggctggctggtactagctcacagggtctgtcacaggatatttggctaaaacaccagcctagcgagggcgcttctgcctgtcctg[212 bp omitted]gaggcaggagaatggtgtgaacccgggaggaggagcttgcagtgagccgagattgggccactgtactccagcctgtgcgacagagtgacactccatctcattaaaaaaaaaaaaaaaaaaaaaggcattctctgagagtgcttgttcaatgaatgaatgagtccctcctctccttcagtctttcagctgatggaaaccaaaggcttcagaaaatcaatccggcaggtggcagcactgagcctcaaggaagccactcagcacaagatgcctcgcatttggaaaaaatactgctttacatgttaagacaaaatgtggaaggtgagaaagcttcattagcaagggtatattccacggcacttctggccccacagaggcccacttccacccatgcaatgcaggtggtttctaagagcccagggccccaataatgagcagtgtttcaaatcacaggctcaaaacatcctaaaactaagaaacatctgacaactgttgattcttgaaccttttttgcagaggtgtgtgtgttgttaaagagagtcatgacacctgctttgcttctaaaacaataaatgcattaaatccttaaaagattctacttgagaaaatggaagtttgagagtttctgctgagcaaacaggcagcgtccagccgagcacgtggctgcccccgtggttttggccaccacccagtgatttactgcttgttcccctcatcttataaggtttcagttacacttgggtcagtataaaactaaagaaagacaggtgtcacacatgtttttcttttcttttttttttttttttaaagatggatggagtcttgctctttcacccaggctggaatgcaatggctcagtctcggctcactgcaacctctgcctcctaggttcaagtgattctcctgcttcagcctccggagtagctgggaatacaggcatgtgccaccacgcctggctaatttttgtatttttttagtagggacagtgtttcaccatattggtcaggctggtctcaaactcctgacctcatgatcggcccgcctcagcctcctaaagggctgggattacaggcatgagccaccatgccgggccacaactataaatttaaaatctacgtttcaaaaaaaaaatctacattttaatcacacattaagtggttctaaaaccaaataagatattcagtttgtttgtttgttttgggagacacagtcttactctgtcactcaggctggagtgtagtggcacgatcttggctcatctgcctctcgggttcaagtgattcttctctctcagcctcctgagtagctgggattacaggcacacgccaccacgccgaggccatttttgtatttttttttttttttttttttttagtagagacagggtttt[132 bp omitted]gacagagttttgctcttcgcccaggctaaagtgcaatggcgccatctcgcctcactacaacctccgcctcctggattcaaatgattctctggcctcagcctcccaagtagctgggactacaggtgtgtgccactatgcctgggttattttctatttttagcagaaacagggtttcaccatgttggccaggctggtcagttcatttttgaaatggaaaagtctcacgctttacatcagttataaatgggaaatggtggctggaagcagtggctccagcctgtaatcccagcactttgggaggtcgaggtgggtggatcacctgaggtcaggagttcaagaccagcctggccaatatggcaaaaccccatctctactaaaaatacaaaaataagccgggcgtggtgtcaggcacctgtaatcccaggtactcggagggtggggcagggagaactgcttgaacctgggaggtggaggttgcagtgagctgaggcatgccattggactccagcctgggggacagagcgagactctgtctcaaaaataagtaaataaaataaaaggaaaatggttttctatcccccattcaaaaacaaaacaatcttaatgtaatctaaactaagtagtgatctgagtgttgaatctaattacttctttatatataactgatgaagtgatctgccggactcctggggagggtcctatgataatacattaactagaaaataactgaaagtaaaaaacatggaaataacaatttaattcaaaatcccgacttcacagctgaggtgtgaattgtttagaatcttcaagtgctggtttctattctccacactctccatggcggcagaacttcctgtcttctccattccctgcttacccgctccctttcacacctgaactttccaccggggaaatgcaagccccacatcccctgcagcagccttcttaagtgactgtgagggcctaggatggggctggttgatttaagtcagtggacctgagcaaggcaagccaaggcagccgacaggcgctccactatcccattagagagagctgcgggaatcccttggagggcagaagctcaggagtgctgggcactagggaaaactggcaggctccagctggctgcagggagctgctgctcacctcctgaaggctgtgtccacatgggaatctacatccagtgcttctagaactcattttgagaggagccagaaattaggattttaatgtgaaatgaagaaactgtttaggctaagcctccaccattttgtgtgtagccaggcacctgaccaacggcttcacaatttggatcagtcagagacaggattccaggcaactgcagcaggaaatacttacttgacagagagggagaagtccccaggagcgctctcactctctcggataagaaaggccccatcgtgccgctgtttgctaagcatttcttctgccttggctctggggattttgccaaaaaaccacctaaggaaggaaggcaagctggtcaacatctgcttccccacaaagaaacgggatatccagccttcaaaatgtgagtaacacaacactccttgccagaggaaggggcctccctcctcatcctccagcctcacagtgcccaagatcgacactgggttgggtccccagagatggaccttcaaaggtctttagcctactccatttcccagaaagcgactcaccaaggcactaaccgtgggtcactctttctatagagggagacatttgaaaatgggccccccaggccaaagcccactggactccctactgactcatgacaaaggcgcctggggaaaagctcaggcctttgggcttggtgtacgggatgaactgccaaggagagactggccccttcctgcagccatgtgataagatcacagcttcaccacagtgggactaagggaaagtggggaggaaacctggacggccaggagctggaggcagggttacttttgctaacagcccaaaggcaaaaggttcagatagtatgagggtgcctctaccagtaactaaggtcagcattcctctcaaggcctgcctctggggccactgctcagagttcagctttcagaagccaccaggaatattgtaatttaccatatgctcagcagctagctgcaaaattcagatttttgaggcaagttgcagactcttctgctcccaattgctgattcaccttggccagaagaaaaagtggctaaattcatgaaaaactgtgaagcaactggctgtggcttatcaagaggaagaggagaggaacacttctacaagagcttcaagtcaagctgcctcactatttcaaatgaaaactataattaggaagaagaaactgtgaaaaccatgttctcttctcaaaattgtctttagttatcatttttaaaagcaaaagttatagcaaataaagacctataaacatggaaactggcattcatttaatatgctaattataatatcaaaagtccttttaatggaccaaatagtccattaaagttgtaaatctaacttacatatcttttcttttttttttttt[134 bp omitted]ggcgcccgccaccatgcccggctaatattttgtatttttagtaaagatggggtttcaccgtgttagccaggatggtctcgatctcctgaccttgttgatccgcctgccttggcctcccaaagtgctgggattacaggcatgagccactacgcccggcccttttttttttagatagagtctcactctgtcatcaaggctggagtgcagtggcacgatctcggctcactgcaaccttcgcctcctgggttcaagcaattctcctgcctcagcttccctagtagctgggattacaggcggccaccaccacgcccagctaatttttgtatttttaatagagacggggtttcaccatattggccaggctggtcttgaactcccgacctcgagatctgcccgcctcagcctcccaaagtgctgggattaaagtcgcgagccaccacgcccggctaatttacatatcttacttataagcaaccatattggaagatgtacctaaaataatatactatactcaaattcaaacagaaagatgtgatctgctaggaaggatacacttagaagctgcccttagtaactttgtccttgtgtgtgtgtgtcagcctctagggactcttagtaactctgaatagtctgacatctacctgcttggagtctttctcattttgcatactctactgccaggatgctgaggagctgggacaatagatcctcctgcttctacaaataactcaaggctagggcctgcagtgcctggaaatcaggccacacaagagaaatcacatatcactagaatagaatgctctctaaatataaaaggacaggctgggcccggtacctcatgcctgtaattgcagcactttgggaggctgaggtggggtgaatcacttgaggtcaggagtttgagaccagcctggccaacgtggtgaaacccactctctaccaaaaatacaaaaattagatgggcacagtggtgggcacctgtaatcccagctactcgggaggctgaggcaggagaatcacttgaacctgggaggcagaggttgtagtgagccgagactgtgccaccgcactccagcctgggcgaaagagtgagactctgtctcaaaaaaatatataaataaataaaataaaaaaggaggctgggtgcggtggctcaatgcctgtaatcgcagcactttgggaggccgaggtgggcggatcatctgaggtcaggagttcgagaccagcctggccaacatggagaaactccatctctactaaaaatacaaaattagcaaggcgcggtggcgcatgcctgtaatcccagctactcgggaggctgaggcaggagaatcgcttgaatctccgggaggcagaggttgcggtgagccgagatcgtgccattgcactccagcct[146 bp omitted]cctgtctttactaaaaatacaaaaaattagccaggcgtggtggcaggtgcctgtagtcccagttactcaggaggctgaggcaggagaatggagtgaacctgggaggcggagcttgcagtgagccgagatcgcgccactgcactctagcctgggcgacaaagcgagactcgctttcaaaaaataaataaataaataaataaataaataaataaggacacttaacggtattgagaccttctcaatcggggggccccaatcaacggtatttaaaccttctcatatcggggggccctgggtttctaatataagtgtatgcagcatgcatctgactgggtacagcagtgaaaatccacacatggcctcggctggctctccccacactgccccacactccccaccactgccacttccaatagcaatggtgagggtgaagattctcaatcagcaaggctctctttcctcctaggcccccaagatctctccactagggaggttttttcccatttgtaggtataaaataatgaatataaactgaaatagcctagatgtacatgaagcaaacataaaaagtaagatgcttccctcaaactccccagaggcagcacgtgttggcggttctaacacttaggtttccagacctttctgtctggtgtcacatagacatggctgctgtgttttcttgcccccagcttaaaattaacgcaattttattttcaattaaaaaaaataaattgtagtgaagtacaaattataatgtttaaaaagtactctaactggaattaaaaccaaaaaccaaaaaaaccacaactctgttataagcacccagatcaagaaataaaaaatctggcaccaggtgcagttgctcacgcctgttaattccagcactttgggaggctaaggtgggaggattgcttaagcccagtagatcaagaccagcccgggcaacacagtgagaccctgtctctacgaaaaataaaaaattagccaggcatagtggtgcacagctgtagacgcagcaacttaggagactaaggtgggaggataacttgagcccaacctggatgacagagcaagaccctgtgaatagctgtcactactaaaacactgaaataccaccattctacatttctatagcattttatatcatttataaatttgactttttaaaatgatgatatgtacatgtgactacatgcttacgggtgaattttttttattttttattttttgagacagagtcttgctttgttgaataggctggagtgcagtggcgtgatcttggcttgctgcaagctctaacaggcaaatgt[135 bp omitted]cccatctctactaaaaatacaaaaattagccaggcatggtggcacatgcctgtaatcccagctactcaggaggtggaggcaggagaatcccttgaaccagggagttgggggttgcagtgagccgagatcgcgccacagcactctagcctggcgacagagcgagactccatctcaaacaaacaaacaaacaaacaaacaaaagatgggctttggcagggtgcggtggcttacacctgtaatcccagcactttaggccaagagctcgagatcagcttggccaacacagtgaaaccccatctctactaaaaatacaacaattcgacgggagtggaggcacgcgcctgtagtcccagctactcggcaggctgaggcacaagaatcgcttgaacccagcaggcggaggttgcagtgagctgagatagcaccactgcactccagcctgggcaacagagcaggattccgtctcataaaaacaacaagaacaacaacaaacaaaaaacaaaaaaaaaaaaggtgggcttatacaacagaaatagcaagggcgagagctaagggggtgaggggagaaggctaattttccaatataattctttactacatcccgtaggctcccatccatatgcatttagtgtgaaaagcacatatttggatccacccctcaagcatatacaactcatgctgcagcactaatgccaacaatcattttgtagtctaatttgttaacttgaatgctgcattagctgacatggtgctacattttatgcttccctcttcctccataacccctgctccccacccccacaaacaaacaaacaaacaaacaaaaaaacaggaggtggtaggatgtggaggagaaggcctggtactgaccctgaccctatactcatgaacatccagccacagagcagccctatacaacagcaactacgtctgcaaggccaaacacctacataggcacaagcatggtctttgttagcaatatggtagacctgaataaataagggtttttaagttgctagttgccttttcagagctcagagtggctgagcactgcccaccctttgggcagagtctgcaaataacaacacagctgagcctgtgctgggtgcttctccatcaattcttctaaagttcttcatagtggggacaaaaggtcaaggcaagggagtgactgtcccagtcagcctggcagtaactacaactttccaaggaaggtagcctttcctatctttcctcaacagtcagatttaaatgcctgtgtcacccgaaacactgaagaaaaataagaatttcgagccacaggcatgtcatataagaagtgtagtatgatgttctgttgaattccctttcaatctgaaaatatgaaaacaaaagggaactgaagtcgatgttgtgtttggatctaatgaaggagccagcaaacaataatggccttctgcccaaatctgcccacaacctaagactgttttttaaatttctactcgattgttaaaagaaaatttttacaaggaatatttgacaggattgtatgcagcccacaaagtcgaaattacttgctatctggctcttcacagaaaaagtttagccaacccttgacctacagtttcttttgaggacgactgaaggaaacagaagtacacaaattatgtggcttatatgggacctggggaggatgtgctgtgatccaacaggcccctcccactcaagatgcgacaagccacctgaaagtctccgccaccagctgctgtgaaagcaagtggacaatgtccaagggcattctagtctgagcgtggaaagcctcagctcccctgacacacttgtaaggcaagccagcaactgcttctgtgctaggagcagggcctgtgaatgaggggtgggtgagaacgggaggacagtggtctgcaggggctctcaggggtccactatgttgcgttattaataaaatcgtgacaagggtagcttctgaaaaaaaattaaaaatattcactgctcccagcagcctggaggacagcatattttgttctcttgtaagtaggaacactaagatggagggataaacatttattgagaactattagatgccaagcaccgtactctggggatacaaagatattaagataccgtcccacagcattagcacatataaacacaaaatcatctaagtaccttttctaaaactcaaaaaaaatgcagaattataaaacacatctggctctaagacatatttaacagaaaaagaattacggacctgcaccaactatcgttttatttttgaagatcactgacagttattatcaatctaaaacatataatattattgactatgatatattattatatactattaacatgcacaatcaatatcctttgttaattccctagaaacgtgaataaaaagtatgacatccatcccagtgatctcaattttaaaaagagtgtttgaaacaaggaggtgggtccaacccttccaagactaatggagcttaacttacggatgtggtttcatttctatgtagttcttgggaatgaagccgtcttttccattaagctctgccttgtaccagttctgatcacattcttcgttcaaaacctgaaaagaaataagacaacaaaaaaacccaatcatttccttttccctttaaaaagatagttacaagacaattatgctatcttttaggtctgtgaacggtttcactcgaagtattatcagttatacggatataagactccttttaacttcaaacaaccagcattatgttaaactctgttaaaatgaaacagaaattatctctgaaaatgaaaattcaggctcccaaacatctggaatgaaaccctcagtaaggaaggagaaagaagaatggcaagtattagttgttttttttttttaagacggagtcttgctctgtcgcccaggctgaagtgcagtggcgcgatcttggctcactgcaacctccacctcctgggttcaggcgattctcctgccacagcctcccgagtagctgggattacaggcgcatgccacgttgcccagctaatttttgtatttttagtagagatggggtttcaccatgttggccaggctggtcttgaactcctggcctcaggtgatctgcccaccttggcctctcaaattgctgggattataggtgtgagccactgtgcccggccagtttttttgtttggtttggtttttctaagagagaaacctggagaagaggttctggaaaatggcaaacacataggagaataagggagcctgacgaagacaaagtctactttctgggagagagaggtgtcacagcagaactaagcagcaacagaaccttttattagactcctctagagatcttccaaccgacctccagaatctacagtgatacagtcctggatcccctcatggcttctctgggttaccgcaagtacgggtcacccaccaaacagctccagaacactgctgcttgtgaggacaaccatatgccctcgtatgggaaaactattttcaggaaaaagcatggcaaatcctactcagttcaataacccaaatgccacattgtattaaagttagatagtgctgaaagcatatcaaccagcagaattcaggcagatgccttggaaatcctggaactgaaccactgcattctacagatgtaaaaaaacaagatcaatggtcaacccaggttacgaggtagtgaccccacagagctaacatcatgcccagactttcatatttccaatgaccgttctctccaatgctgcctcttgaattgcatgtaccaggccatgcataggctaggccatgacgctgtaatgtgtagagtaatacagtagtcctccttatcatgatggatacgtttcaagacctccagtgggtgcctgaaaccgtggatagtacaggactctagatatgctatgctttttccta[195 bp omitted]cacgcccggctaattttttgtattttttagtagagacggggtttc[131 bp omitted]aactcctggactcaagggattctcctgcctcagcctcccaaagtgctgagattacaggtgtgagccaccatgccagtcctacctataagtttaatttgtaaattaggcacagtaagagattaatgatgactagtagtaaaatagaaaagttttaacaggccaggtgtgctggctcaaacctgtaatcctggcagtttggaaggctaaggtgggaagactgctttagcccaggagtttaggaccagcctgggcaacatagtgagaccctgtctttatatttaaaaagtgtaaaagaaaagttataacaatatactgtaataaaaatttatgtgaatgtgttatctctcaaaatatcttttttttttttttttgagtcagggtcttgctctgctgcccagtctggagtacagtgacaccatcacggctcatggcatctcaacttcctgggttcaagctatcctcccatttcagcctcctgagtacctgggactataggcacttgccatgttgcccaggctggtcttgaactcctgcgctcaagtatcctcctgcctcagcttacctaagtgttgagattacaggtgtgagccactgcgattggccaaaatatgttatttatatgttggattgcaactggccgcaggtaaggggggactagtatatacggagcagaacagaatcaggtacagcgtgaaagccaccctatgaattctagacttacaacaaaaggcaaagggcagaaggcataaagttggtaaaagataaaacaaaaatgtgaatacaaccccaaaatggtgggcccaggaaaatgttggctagtacagtggtaatctacactgcataacaaagttctgagaggaaactggtaacattctttacaaaatgatttattcaagatgttgaacaatgctgtactcgtagccaatcagaagctggattgctctaaagtgagtgctgtctgtgtactgccattcaaagtgagatgcaatagaaagggtagataagaatgacagatgatcgacaactagccaggctgcattaatgactacgctttcttaacagagggtatgccctgcagagctttgcaatgctggtgcttatctgctatgcttaccacactctgactgcaggtgccagacactgggtttcaatgcttaggataaggtgataaatcctgaaagagctaataaatatgtgtagcaaactctcaaaaaaaattagctagtggtaaatcccagtgtattcaaagtttccaagagtcacataaatattgatagagtattgatgaaaactttcttctagtcatcattttgtttctcgtaaaaaaatcacatcaaagactggaatgagataaaacaatatatgcaaggtacactcataatttttaagtcttcattttaaaaacactgcattgtgctgcagccagcaatggtgctgtattgatagacaattataaagcacacaccaaggacaagtttgaggagggaaagtgcgcttgaaccctgccgggccaccaccacctgcccctgtactggcagcacagaaaactctgaatagcctttgagaaaaggagctactttaaaagttatttaaggccaggattctgttatctaccaaaaataaggtctagaaggaaaatgtggtctaataatgaccttataaagcatcatcctatagtaataataaaaaccccacaggcttataaacaatatttattattttatttcagagacagagtctacgttgctcaggctggagtagctgggactacaggtgcgtgcacccataccagctatgaagagtttttgaaaatgtcttaactcctgaaatggtgaggtgtgtctacttttactgtatacacttgttcttggaagacagagagtcagactgacaaagagctgcttgtaacctatttgtgcatcaaaacagaacaaagtaatcattagaaagggacacttttgatttgtgaccaataactttgcagaaaaagataactctatttacctgccaggagttcatagagctacactctcttcttgtcacctttaccaagacagaggcaaatccctctaaaaagtgtcccctcccccaacaaacacaactccagggcaactcctagatttgacatcaacttagaactatggctgtctacagaacaaaaattattacttggtgtttagtatgtttttctcccccagaaagaaggaaaatatggaattaatgcttttaaaaatgtaatttttttttttgagagagtcttgctctgttgctctgtcacccaggctgcagtggagtggcatgatctcggctcactgcaacctccacttcccgggttcaagtgattcaagtgcctcggcctcccaagtagctgggattacaggcatgcgccactatacccagctgatttttgtacttttagcagacacgggatttcaccatgttggctaggctggtctcatattcctggcctcaagcaatccacctaccttggcctctcaaagtgctgggattataggcgtgagccatcatgctggccaaaaatgtaacatttgagtacatgaatggttacgattttggttatctggaaaattctagtatccagaatatcacgttatcagatagcccaggtattgctgcacatacctctaaacctcttcactctagaatttcagaaaaagcttggttctgccggaggcaaaacacaggatgaacaatgcagctgcaaccctgagccagagaccaggcctttcaacccaactgctccacctgcactgggagcttgcacacacaagccctgaaactggagtgatgtaattagatgcttaaaaattaagttttattcaaatgtttaagtatacaaaacagctactgaagtgtcgggttaaaaaaaaaaaagaaagaaaaagaaaacaaaacagcaaagaacacaaatgaatgttgaagagctcgaggtggcagagaccagaagcatctgaggatgaggctgcacctacaaagattgtttcatttgctgtggctttaggtgaaagctcacatccttcaca[137 bp omitted]tgcctcagcctcccgagtagctgggactacaggcgtctgcaaccacgcccagctaattttttatatttttagtagagacgggtttcactgtgttagccaggacggtcttgatctgacctcgtgatccgcctgcctcggcctccaaaagtgctgggattataggcgtgagccactgcgcccggcctactattactactactactactactactactactactattattattattattattattattattattattattattatttattgagacagagtctcactctgttgcccaggctggagtgcagtggcacaatctcggctcactgcaacctccgcctcccaggttcaagtgattctctgcctcagcctctcgagtagctgggattacaggcacccgccaccacgcctggctaatttttgtatttttagcagagatggggtttcaccatattggtcaggctggtcttgaacctctgacctcaggtgatttgcctgccttggcctcctgagtagctaggattacaggcgcctgtcaccatgctcagctaatttttgtatttttcatagagacggggtttcaccatgttggccaggctggtctcgaactcctggcctcaggtgatctgcccaccttggcctcccaaagtgctgggattacaggcatgagccaccgtgcccggccacaaataatttttaaaggcctagtcagactcctgagcatgagcaagctgctcccatcactgtgtcttcacttgcttattcactccctctgcacaaatccacgggtgagctcacaaaaagtttccttcagctttaaaatctccaaggaatgtttttagctattaccccacagctgcattttctattccaacccccatattccctcgagttatgactttgtagccacacgacactttggtttaacggaagcagattgatcaagagatgagattataagaggaggaagagacaagtttcagtgaagacagttctttttgttttttggtttttttttgcaaagagactgaaaataatgttaagagcccaaatcaggaagaaatttaagagatgaggaatgaggtgagctttacacagaagaattaaaaatatacaagtcctttctgtgctgatagcactcacgcaaatggtcaactttcctaaaattcactggactttctctaagaagtgtggcaagcatcaaccccacaaagtgacacagtacaagaagggaaaggattctctgtatgcccagggaaagcggcgttatgacaggaagcagagtggctatggtgggcagactaagtcgattttccggaaaaaggctgaaaccacaaagaagactgtgctaaggcttgagtgcgttgagcccaactgcagatctaagagaatgctggctattaaaagatgcaagcattttgaactgggaggagataagaagagaaagggccaagtgatccagttctaagtgtcatcttttgttttattatgaagacaataaaatcctgagtttatgttttttttttttttttgagacagagtcttgctctgttgcccaggctggagtgcagtggcacgatctcggctcactgcaagctccgcctcctgggttcacgccattctcctgcctcagcctcctgagtagctgggactacaggcgcccgccaccacgcccggctatttttttgtatttttagtagagagggggtttcactatgttggccaggatggtctcgatcacttgaccccctgatccacccacctcggcctcccaagagtttatgtttacttcaaaatatatatatatatgtacaagtcaatggaaggggacatgaaggaactctagaggtgctgtttatctcacatttcctgacctgggtgtgttctgtttgtgaaagttcactgacctataatgatatatacattttcctttttctttctttctttttttttttttttgagacagcttcagttttcactcttgttacccaggctggagtgcaatggcgccatctcagctcactgccacctctgcctcctgggttcaagtgattctcatgcctcagcctcccaagtagctgggattacaggcgtctgccaccacacctggctaattgttttgtatttttagtagagatggagtttcgccatgttggccagggtggtcttgaactactgacctcaggcgatccacccgccttggcctcccaaagtgctgggattacaggcgttagccacggcacctggcccttgcacttaattttctatacaaattatagaaaaaggtgtcatttagaaaaatggcaagtattttgtttatagattgctgcattttgaaataaggggatattttctggcctgaacatattcagtcatctgtaaatgaataaaaaatagaaatcataattttttttaaaagaaataggctgtacagttatggtcccatcaagcctttcaacacgcgctccaattccaacagcttgcagaaaagttcaacatttcttcagggaaaaattattcaaagttttatcaatctgtgaagcaatttgtgtgagaacatttgtgcatgaatgataggaagaattacattttaaagctcttaacacgtaaaaaaccaaaaacaccatttatagttggtccctgcagtgcagaaattcaacataagccagtgaggtgtccccagttcttcaaagaacccagataaaactagtctaactcttgagtatcactcaggcaatcccaaaggagcgatactgaaatactgccatgacttgaagacaaatttcaagaattctagtgacatctactacataatttcaagttcctagaaaagagaaaacacacatgcatgcatgcttttaaaagactttagcccctaagaataaattctaagggccctggctagggtaacagtaatgggagagccactcaaagtcagttctcttcaggtgcctgattacgtattttattagaagctattagaatgttcttcaacttcccttagtatggataactgactcagtttcaagctatagtgattcattactaacactttaaataagtgcttcacaatcaccacctccatctgttacagtttttctgcaacatgaaaaacatcttggcaatgctgcctgctatgctgtgtgccaaatcatgaaaaacacccacagtgtagataaacgattaacaattttagtgatgagataaccagcaaaggtagttcaataattaaggtttctggtcccacagaaagcttgaattgctcacccaggaacacagagagaacagttctcacatatgccgagcagatcagtctccatttggaatgaccgcaactacagcaaggccacggctcaataaaaatctgaaaagcatcttcgccaaccaggccaggtgatacgtacttggcttttaacaaccagaaagttgagaagaaatgaaatgcatttatgaagttttaaaactctcctggctgggcgcagtgcctcacgcctgtaatcccagcactttggcatgctgaggtgagtggatcacctgaggtcaggagttcgagaccagcctggtcaacatggtgaaaccctgtctctactaaaaatataaaaaattagctgggcttggtggtgcgtgcctgtaatcccagctactcaggaggctgaggcaggagaatcgcttggaggcaggagaatcgcttgaaaccaggaggcagaggttgcagtgagccgagatcacgccattgcactctagcctgggtgacagagtgactccattaaaaaaaaaaaaaaaaaaaaaacacaaaagaaaaacaaagggtatttgttagtcaggtatacctcctgacccctggtgatggaatggtgagaggttctgacttagcaccttttaaacatttttaaaggaaaagaagaaaaaaaagggaaggaggaaggaaagacagggaggaggacaaagtccccaaactccaactttccacggtaaaaatcattcattactttatacttccctctgcctatgaaggaaggagttgtgccccatgaatactgctttctttccaactgcaacctttctgaaaagtagctgctcaaagtggggatcagtgtgacagggaaacattggtgagtcaggagatggggacccaccaaatgtccaggcaacaacgcttaagtgctccaaagttaaccaccataatttttctgttaaaaagccgtaagtatccttctacaagtgcaaatatagtctggcattccagttttcataatttggccatcatcgactctctgctctgatctcccattgcttctccaaatgagccctgccgtgcagtcagctagtcaactcaccgacctctaaacacactgtactcctccccaccgcttgtctgtacttttccttgtctactgaaatctttcaaaattcagttcagagcttacaaccaccctggtcacctttccctctgcttcaatcttatagtatttaatggaggattactgtcaataatataatcccttatggtatctggtctatcactacttggaccatgtgctgctatgtcttggccccctcccaaactaacccgcaagcaatgaagctggctccatacccagttctcatttgtcttcctcacagctcttagtatggtatctagcatattttggggaactgacttatatgtgggggctttgttctaagtgttctaagtaatacatttagtgccctagagcaagctgggtctacaacaatttatacattctctctcttcttttttaataaaaaattgagacgagggtcttcatatgatgccccggctgttctccaattcctaggctcaagcgatcctcccacctcagcctcccaaagtgctgggaatacaggcatgagccaccgcaccgtcaatttatacattcttggtgataaacaagaacctcttaaatagatcctagaaagactgccatgagtttgttgatccaagcaaggagaggtaaaggaggtaagagaattaaacaatcagtcttcctgtaacgtaagcaccctgcctaaaggccatgtggagtacctttccacaaggccacctacttctttgtctaagtaggctgggtgcagtggctcacgcctgtaaaatttcagcactccaggaagccaaggcgggaggatgccttgagccttggagtttgagtccagcctagagggtacagggagaccctgtctctacaaaatattcaacaattagcctggcatggtggtgtgcacatacagtcccaactactcaggaggctgaggtgggaggattgcttgagcctgggaggtcgaggcctgcagtgacctgtgattgcaccattgcactccggcctgggtgacagagagaaaccttgtctcaaaaaaaaaaaaaaggtataagattgggaaggagtgggggtgggtgggtagagcagggaactttcagtatgacagggataaagggggctggaccagggagagaggaggtgtaagtctgtttctacacatgtcctattaatccctctcaggatggagcgcttcctggcaatgtgatgtctaattctgattcggtctgcctgtctgacttgtgacagacttttgcagggtgctaattttaatagctacaactctgccagcaaaatttttatggaacagtctgcaagaccttggattttttgattcacccactgaccagcaactaggctgatggagaaaaatgatcacattaagagaccaggactattcatgtattaaaaaagtttctttataatgttcatacatgttagaagatgaacaattaagacgactaaccaaattacaggatatttctttctctgagaaatattttagttcaaaagataactaggatatgctcatcaacctcttcagttgacctcttatcatcaagagaaattgctcttgatatttttaacaaaacaggaaggtagttcacacttatgtgatattactccacccagataaatctggaggcagtgaaacctaaatgcatagacaaaccccaaaataaacttctaccaaaggggtacaaaaagtttccattcaaaataactgtcttgcgttttgtgacatgtggaagtcctatttggtggagctgaaatgctcttggaatgtcagaatttcaactgcacgagcagggagaagaaaggagaggaagggagggggcaggaagagaccaacacagagatcaagaggtttcaagaaaaatctgtgtatttgaaaaattcaacaatcatatgatgacctgtactagacaaacaccaagccctgggctaggtgaactgaggataaaatggatacccttcccaaggagcttaggggactagaaagctgccaggtgcatcacagtgtgacgaatgtcaggagtggggagttatgggtactatgtaggcatcaattcaatagaaaacatctgacttccaaacaccaaagacgatgacttaactccaggttagggggtatcaggaaaacatcctagatgaagtgtgaacttggttattccctgtctgcatctttagctctgcttagtctgtgtggactgtgagtagaaggaacatggcagactctgcaagtagacagattgttgtttggctgctattaactaaaacactggttaagcttcttttagcttaaaggtaaaatatttattaatggtatcagaacttctaactggaaataacctaaataacctcaactgtagctaatttttttttttttttttcagacagagtcttgcttttgttgcccaggctggagtgcaatggcgtgatctcagctcactgcaacctccacctcccgggttcaagcgattctcctgcctcaacctcctgagtagctgggattacaggtgcctgccaccaagctggctaatttctatattttcagtacagacagggtttcatcaagttggccaggctggtgttgaactcctgagttcaagtgatctgcccgcctcggcctcccaaagtgccaggatttacaggtgttgagccaccgcgctcggcctcaactgtagctaattctttactttaatgacacatatttagcaactgtccttttcatcctttcactaacagaaggaggcttttaatcttacatgaaatcctacactcctctcttcaaaaaataaaacacaaagcctccccaaccccccacaccccctcccaacccccccgcctgggggagcagctgttactcatgttttgtgatgctaacaggcaaacccgctcctgtgtgtcagttccaccctctaaggtctccactcacttcccactgcctcagcataaagcagaaaacaggagctcaaacctctaccctgaaaattaatgacaacagaggtttttttttaaattttatttattattattatttttgagatggagtcttgctctgtcccccaggctggagtgcagtggcgcaatctcggctcactgcaacctccgctcctgggttcatcccattctcctgcctc[177 bp omitted]ccccgcccgacaacagagtttatttaattccacgtaagactatgattcaaggggtcaatgaaaggactgatcgattttcagtcgttctgtgacccaagagccacctcagaggatgttattgaaagaagaaaaagcaatgttggtcacagaactattcaccaacgtgtgcataaggatacaggactgaaaaactcaaggctggggtcctcccaccaggacaccgttaatttccaactcaaaaagctagttccaaatgcattttctacttctgaagcagttaatctagttccaaatcgggaaaggcttgttataatcacatgacagaggaagaggaactggggtagagtggcaagtccctacccccacccccacccccacccccagggtggaggcgaatgcagagagttcaacaggtaatgacaatacaaactgcaaatgtggattcaagctagtggacagggtcagggagcagaaaacacagggacctaaactagtctcggggtgggggctgcctgagaaagcctccccaagccagtgacatttgaagggagatcaaaggctctcctgtgggtggtctggcagaagaccacagtatgcaaattaagaagctcaagcttatatgttacaatcatcagaagtcgctgagagtgacattcaggtttgcatttttcaaaagctcctctggctgactgtgagatgaactgcaaggaggtgcaggtgggtggggcagtgcggtagagaggagagagtcgaggtatttctggaggtagaatcaaaaggacttggtgatgagatgctgctcagtggtcttcctctcggccactgattttttttttttttttttctgaaaactgctttagaaaaactgctatattggctgggcacagtggctgatgcctgtaatcccagcactttgggatgccaaggcaggcggatcacttgaggtcaggagttcaagacccgcctggccaacatggtaaaaccctgtctctactacaaaatacaaaaaattatctgggcacggtggcgggcgcctgtagtcccagctactcggggggctgaggcaggagaatcgcttgaacctgggaggcagaagttgcagggagccgagactgcgccactgcattccagcctgggcaatagagtgagactccgtctccaaaaaacaaagacaggtatcaatcttatgctg[134 bp omitted]acctccaccgcccgggttcaaatgattcccctgcctcagcctcccaagcagctgggattaccacacctggctaatttttgtattttttagtagagacggggtttcatcatgttggccaggctagtctcaaactcctaacctcaagtcaccttggcctctcaaagtgctgggattacaggcatgagccactgtgcccagcctgctctgactttttggctctgtaagaaccacatcaacaggctccctcactctctggctcccagtgctattaatcaatggggaggcctgcagaaggtcagacgaagggagggtcaggtcagggcattcattctcccagctcccaccctgagagtgtctgtggacagtcttggactctcaattgaaagtaagtcctttccttctccaggtttgggcaactcctcccccttccttctccctgtcgtaggcctcatggtggtaacctgattaccagctgtggacactgcattatccctgtggtttctagagaaacttcgcccacactgatagcggcaggaggcagacaaatgcctcacaggggcgggtctccagtgaaaccccacctctaagccaaagacaactgaaagcctgaaagccacactacaggtcaaatccatggaccggactgagaacccatcttcccatttggtaggctttcctctgattgatccccactcttcacctattttacatctacctaccctttccgaattgattttctacactgccatgcccatctttgagtggtgcctttgctttagcctttctttgcatgcccacaaaccattcagcatgcatgcccctgttctgagcccataaaagcccccacccagccacactgggagagaaaccaccagacttcaggggtggggaaccactacctcctccgctcctgaaagctgttcaccgctcaataaaattcttctccaccctcctcacccttaaattgccagtgtaacctcattcttctcagacacaggacaagaccttgggaactgctgaacctgggaacaagccataacacaggtgagctggggcatacccagcccagccatgagctgagctggtgcgcaaccaagacttagcctgagtgggctgagtgtggaggtccccagctggagtcaacaccttgcaaatagtctcattattaaaatcctctcaatttaagtgtgtcaggtgttctctaccaggactcagactgaaattagcctaaaatcagttgtatatgtcttttggaatgcattaaggacatgctcctttatataaagtgacatttgttatggggcagaaagtatccaaattctaccaactacttggaagaagaaaactataaaagagccaaacaattctgttctgttaaccgctttttcaaaatttgagacaggggtcttgctctgtggcccaggctggagtgcagaggcacaatcacagctcaatgcagcctcagcctcccgggctcaagtgatcctcccgtctcagatcttcccacaaatagctcggactacagatgccagccactacagctggctacttttaaaatttttttgtggaggcagggtctcaccatgttgccaaggctggtctggaactcctggtctcaaggtatcctcccatctcagcctcccaaagtgctgggctataggcatgagccataatgcccagccctattctgtttactattaaaagttgagaaagggggtgaaggtataaaaacctcagatttgtaatctgaccattactagactggcataatgacttgcagtagctgcccctttgaattgcactttagatattgttcaagtgtctactacactgaaagcattgtgttaggaagctgaaaagggaataagaataaaaggcatggtccctgccctcagaagtgtttatgagctaagggagctatgtgtgtaaataaagaggaaataagtaaaaaagtgagataagggaaattgctgattttgagctggacacagaattcaccgctacatgtttctatttacttttcagttttagagacagggtcttactctgttacccaggctagacaatgcagtggcacaatctctgctcactgcagcctctgcctcctaggccaagtgaacttcccacctcagtctcctgagtagctgggactacaggtgcacgccgccacgcctggataatttttgtattttttgtagagatgcggttttcccatgttgtccaggctggtttcgaactcctgagttcaagcaatccgcccacctcagcctcccaaaatgctgggatttcaggcatgagccactgcgcccaacccagcaacatgtttctaaattagctgcatggctgacatggaaaattcaactcatgtgtggacgttctagaaaaaaggacaacttcaaatagtctaggaatagggcaagaacctaaaggtagaacagcttataacaggtgagagggtatagtaagcaaagtaattttccctcttgtattttcattgagtttaaataaaagaagccattcttgtttaatcctactgtcctctgccagactacacattgctctcttttgatggagctgtcatatgtttcaatgataaatggtaattacatacatttggacagctggatgtggctcaatcaagcagggtcctctcttacaggtaaccatgctggccatgttactaaaactactgcctaacagataagacaagctgtcctccctgttgcctttagcctgctaaggctgtaaaacctgagagcccagaaaccttcgaggacacatgtaggcttgcccaga[132 bp omitted]acccccgcaccctctgcctcctgggttcaagtgattctcctgcatcagcctcccaagtagctaggattgcaggcgcccaccaccacgcctggctaatttttgtattttaagttgagacgaggtttgaccattttggccaagctggtcttgaactcctgacctcaggtgatccacccgcctcagcctcccaaaatttgtaatcctgggattacaggcgtgagccaccacaccctgctgactcagacatctgatggccacccactgcctcactttggatgatcatattggcaaagatgaaaataagttaatacttagtgatagggatagtatcggtgggaatataaaaaggtatatggctttatgaaaagtaattcgactgtatgtattaaagatctaatgttcatacctattaacccagtaatgccattcttaggactctatcctaataaaacaaccaaaaaaaaaaaaatacatagtcaagactaagggagcagctgggcacagtggcatatgcctgcagtcccagctacctgggaaagatcccttaagcccagcagtttaaggctatagtgtgctatgattgcacctgtgaatagccactgcactctggcccaggcaatatagcaagatctcatctctgaggggaaaaaaaaaaaaaaaaagactgagtaaacaagtatgagtgagtgcctattttgagttaggagctatgctaggtcctggggatacaattttaaaaatgagccttactttcaaagagctgacagcaggggaagccaagttcactacaacttcaggtgtaagttctatgagtccagagtgctctgtatgaaagcacatcttggggagaccgaatctaatcaatgcaaggaaagctcacttgggcggtaacatttatttatttatttttattttttttgagacggagtctcgctctgttgcacaggctggagtgcagtggcgcgatctcggctcactgcaagctccgcctcctgggttcacaccattctcctgcctcaacctcccaaatagctggaactacaggcacccgtcacc[179 bp omitted]tgtaagtaggctgtagtgaggcttggggacgggcattgaggacacaaatgagagcaagaaacattccaggcagaggaatgcgcaggtgcaaaagttctcaggcaggaagggatgtggcatagtctaggggagaccagggacagagaactgagcccgactgtgcagggcagaataaggacttggggaatttgctcattaggatgatggttctggcttgtgtgtggcacacggctctgaggggacaaagagcagcagcaggaagatcaggtggagaaggggttactgcagggagccaggagggagcagacaggaattgagattagggtagggggcttctgactgttttgaagagaatctaaaatgaacactgaaaaacccacatgcattatttttaagaatctaagtttatccctccctctcaaaagattccctctgtacttctgtaggaacagggtgcacaggaccacacaggatgagacatcaaattccatgtcatatcataggcttctcaaagtgaaaaaattaaaaattagaggaagacggccaagtgctggtggctgacacctgtaatctagcactttgagaggctgaggcggaagaatcacttgaacccaggagatcaagactaggctgagggatatagccaagacctgtctctacaaaaaatagaacaaaaaagttagctgggtatagtggtgtgcggctgtagtcccagctactctgagactacagtgggaggatcagttgagcctggaaggctgaggctgcagtaagttatgatcatgccactgcaccccaatctgggtgacagagcaagacctacctccaaaaaaaaaaaagtttaattattctccaccataaacaaagacaaagagaaagaaaatatattaaagggataatccctcacctagaaggaatgatcccattcttcgagaatataggtgatatcttaattgttgtacaattaaaaacagctacaccaaactgctcataaccaattaccaattcaaataaatatatagaaaatctttacaatctatgaaaattctaagtagtacactctgacacattttattcacttatcacgtatagttacttcacttcaaagagtgacattagggggcttacaagaccccaagtacaggcctttgcattaagaaaatggacatcagggttcaggatataaaaaccttttcctaagcatctctaatggaatcggagacaaatataactattgttaacaggcaggctaaattaactacctccttttgctgctagaccagaggcttctctagtaattaattacccaggtcctggcctccttcaggcagctacacagctcaggaggagcaggttcaggttcactgggagggctggggggcagggcagccgcagcacagcccctgctcttggcaggcaccatcatgaagagacaagctcagccttgctccgcctctagttctttctctaagcacctacacgctgctccatgtgaaaaatcagcacttttgtcccacagaactgtcacaacctgcagagaagagagggactaagacggctaaatgataggatgtattaacgcaaacaacaggcttgtcagacccgcaactccaagttacaagaacaacttcctgatttcatgttgtgcttaaaggagaaatgtgtgtacaatcccatgattctgggtcaggccccagtaccaacagaacatccacgctccctggaaatggaagggtgaccaggcataaacggttcattctcctgctcacaatgacaagtagtttcccaaaggagaaaagcgatcagacatattatgtgacaactaagatatccctactgtttgcagctacagcctggtatcactcagcctttatgatcccctctatgcagtaaaagtgttttaatgtcacggatgtctatgtataataaatcaataatgattaaggctatcaactctgaactgactagcaccaaaatttccagttttctctagttgaattttcatcatcaagctcacaagaccgttctctgggagaaaa[141 bp omitted]aaaccctgtctctactaaaaatacaaaaaattagctgggcgtgctggcgggcacctgtagtcccagctactcgggaggctgaggcaggagaatggcgtgaacccgggaggcggagcttgcagtgagccgagatcgcgccactgcacttcagcctgggcgacagagcaagactccgtctcaaaaaaaaaaaaaaaagacacagttgtaccttgtattcatgggggactggttccaggacccctgcatatacccaaatctgtgcatactcaagtcccacagttggccctctgcgtaagtgggctgtgcatcctgtgaatactgtctttttgacacacatgtagactgaaaaaaatccgtgtataagcggaaccatgcagctcaaacctctgttgctcaagggtcaactgtacttcctttactggttgggcttctgtatttcctcgagtttctatgcccttaaaaaaaaaaccatttttaccgggcgcggtggctcacacctgtaattccagcactttgggaggccaaggcaggcagatcatgaggtcaggggttcaagaccagcctgacaacacggtgaaaccccgcctctactaaaaacacaaaaattcgccaggtgtggtggcacatgcctgtaatcccagctactcaggaggctgaggcaggagaatcgcttgaacctgggaggcagaggttgcagtgagccgagactgcgccactgcac[133 bp omitted]gaaactccgtctctactaaaaatacaaaaaattagccaagcatggtggtgcatgcctgtaatcccagctacttgggaggctgaggcaggagaattgcttggacccggga[131 bp omitted]tggaaatgtcttgattctatgtttatacttgaaggctatttcggctgggtatagatttcaacagaatcctgggctgaacagcattttccctcagaacttggaagagacattgttttctggtattcagagttgtacaagcaaagtttattcatggtctttttttttgggggggggggggagatggagtttcactcttgtctcccaggctgcagtgcaatggtgcgatctctgctcactgcaacaacctccacttcccatgttcaagcgattctcctgcctcagcctcctgagtagctgggattacaggtgcctgccaccacaaccggctaatttttctatttttagtagagatggggtttcaccacattgccagtgcttctcgtaggaacacaaaccctactgtaaactgctcacgcgagggatctaggttgcccgctccttgtaagaatctaatgcctgatgatctgaggttgaacagtcatcctgaaccatctcgaccccccacttccatggaaaaattgtcttccatgaaaccagtccctggtagcaaaaaggttggggactgctggattcaagaattgctggaagagcccactgcagtcttccaaaagatgtgacagctattattcaaacttccagaaagagaacagtgaaaatagaagaaaagacactacgaaatgttttttaaaaaggaaaaacttaacttctcatagctgatgaatatgaattttcagataggaagggcgcactgagaacccagccatagtgaataaaaacagatctatggccgggcacagttcatgcttgtaatctcagcacttcggg[225 bp omitted]aaattctacgaaggtgctgaatcccatctcttcttgcctgctcaaggacattaactcagttattttcctttcttctgcatcatcaattttaattaaaatctctactggatttttctaatcaacaaataaaaatgctgtcatttctctcatctctgggagtggggtgaaagcagacttcttttgactctactgcctcatctctctgttcccctttaaatcaaaactttctggaacagttgtctatactctctgtcccagttctctcctcctccccaaacatcttgttataaaagctttcaagcataaagcaaagtgaaaagaattttacagtgaatacatttatccatcacataaatcggggatgtccaatcttttggcttccctgggccatactggaaaaaaaaaaaggtcttaagccacacataaaatacactaacactaatgatagctgatgagcttaaaaaaaaaaaaaaaagcaaaaaaatctcataatgttttaagaaagcacaaatttgtgttgggccgccttcaaagccatcctgggccacatgtggcctgcgggctgtggggctggacaagtttgacctaagttatttgctctgtcacatatctatccatctatatacatccctctctcctattgatgtatcttaattttcctttcttcttttttttttttttttttttttaaagagacagagtcttgctctgtcgcctaggttggagtgtggagtacagtggcgtgatctcggcttactgcaaccttcgcctcccgagttcaagcaattctcctgtctcagcctctcgagtagctgggactacagacgcacgctgccatgcccggctaatttttttttgtactttagtagaatcagggtgtcaccatgttgcccaggctggtgtcgaactcctgagctcaggtaatccacccgccttggcctcccaaagtgctaagattacaggcatgagccaccgcacctggccctatctatcttaatttttaatgcatttcaaagttacagatatgagtacatttccccctaaatacttcaatatacatattattacctatatttaaatatttgggccaggtacagtggttcatgcctgtaattccaacactttgggaagctgaggcaagaggttcgctggagcccaggagccaagaccagcctaggcaacatgttgtgaaaccctgttctctaaaaattagttaggtgtggtggtgtgtacctgtggtcccagctacttgggaggctgaggcaggaggatcgcttgagcccaggaggtcgaggctgcaatgagccatgatcacaccactgtaccgcagcctaagtgacagggcaagaccctatcattcgttctttcataaatattagtttgcatgtataatttacatatctgctacctttgagataaagaacacatctatcaccacagcaagtttccttgtgcagctttccctgtgcatacccatcctctctgaaccagcttccaagcacgattccgctcgtaccactctactgaaactactcaaggtcaccaatcagctcctgttgctgaatccaaaggtcaattccctgccctcatctgacttggcctataagcagggcaaaacagaagtgatcatttccttcaccttgaagcactttcttggcttccaagacacatcatttcccagcttttcttcctacgtaactggccacttcctgttgggtctcctttgctagtttcttatctcactaacttttaaacattcaggtgccccaagggctccatccctggaactcttttcttctccatctacactcattcctttagtttccccatccaggctaatggcttttataacatccccaaatggaacacttttcacttttaccaccatcattctgatccagccctatcattatctctgccttggattactgcagtggcttcctaatccgtctcactgctttcactttgccaccatcagaatcttctgaatcctgcaaccagaattagcatcattaaaatgtaaggcagaaatgtttgagggtttttctttttaatttttatttctcactctacactgatgtagttaagtcagaaatgtcacagccaagaggagtctagagagatatgatgactaggtataatgtggtgtcctggatgggaccgtagaacagagaaggacactgggaaaaactaaggaaatactgaatcaagtatgaactttagttaataataacgtatcaatattggctcattaatagtaaatacgccataataatgttagtaataggtgaaagtgaatgtggggcatatgataactctttgtacaacttctctatcaatctaaaattgttctttgaaaaaataaagttgtcttcttttaaagttggactgtcaggtcatttggcttaaaatccttcaatggcccaaatattccattcctcaaacatctggtgctccctgacggtctattcatgcttaaaactgaggcaggccaggagcagtggtgcacgtctgtaatcctagcactttgggaggccgaggagagtaaatcacctgacgtcacaagttcgagaccagcgtggccaacatggtgaaactttgtctctactaaaaatacaaaaattagctgggcgtggtggcaggcgcctgtaatcccagctactggggaggctgaggcaggagaaccgcttgaatctgggcagcagaggttgtagagagccaagatcgcgccactgcactcctgcctaggcgacacagtgagactttgtctcaaaaaaaacaaaaaacaaaaaacaaaaattagctgggcgtggtggcgcgtgcctgtagtcccagctactcaggaggctgaggcaagacaatcgcttgaacccgggaggtggaggttgcagacgacatgcatgagccaccaaccaccatgtctagcctgaaattaccattgatgtaatctaaatgatggtctttgctatgttagtcaaaggtgagctctctggaattgatttttttaatcctttaacctaattattaggttcactgcccacacaagtatagaggaagaaaatagctaagtaaataaatatttaaaccaaaaatgtggccacaagccctgttaaaattattccaaattgcattttacctaaattgttagaaaagaattcaaatatttaacattttgactagagttttaaaactccaattcatgttactaaatatctcctacactatgggtggagtgtgtttttgtctgttttaaattccaatttaagttgcattctagcctctttccattatttatctgtggcatgctcattccccattacctttgagtgtttgctgagtggttagctctgtatattcatggcattatcctaaaacggagaaacatgttaacactgacagagctgtcattaagatcattaagagtaacagacagggccagccgcggttgggcatgcctgtaatcccagcactttgggaggctgaggcaggcggatcacgaggtcaggagatcaagaccatcctggccaacatggcgaaatcccatctctactaaaaaaaaaaaaaaaaaaaaaaaaaacaaaaaattagctgggtatggtggcacatacctgtaaatcccagctactcaggaggctgaggcatgagaatcacctgaacccaggaggcagaggttgcagtgagctgagattgtgccactgcactccagcatggcgacagggcaagactctgtctcaaaaaaaaaaaaaaaattatatatatatatataaatatatatatatataaaataggccagtggcccacacctgtaatcccagcactttgggaggctgaggtgggtgtattacctgaggtcaggaattcaagaccagcttcaccaacatagtgaaattctgtctctatttaaaaaacgcaaaaattagctcggtgtggtggcacacgcctgtaatcccagctacttgggaggctgaggcaggagaatcccttaaacccaggagggtttgagactacatctcaaaaaaaaaaaaaaaaaaaaaaaagaggaataatagacaatacaactttggttaaattgtctccaaatagctgatggctcatacatgtgatctagcacattgggaggccaaggcaggaggactgcttgaagccaagggctcaagaccagcctaggcaacaaaagtgagacccatgtctacaaaaaatacaaaaatcagccaggcacggtgacacatgcccataatcctagctacttgggaggctgaggcaggaggatcacctgagtccaggagttcgaggttgcagcgagctatgatcatgccactgcactccagcctgggtgacagagtgaggcattgtctcaaaataataataataataaataataataataatttcagattggtgtgagtaagcacagcactgaacacaaagctctccatggcccagaccttgcctaactccccaatctccacctgccagtccctgtcatctcctgccttcctgccttgaactccaagtttcaacaacactaaagctacctgcggtttcccaactgccagaatgttttatgattttcacacttgtatatgttgttctctctgcctaaaatggcaaactcaagacctaatttaagaatcactttcttcccaccactgaaccatgtatacctgtctcaatatactcttttctctactaaattgaactacttgtgggtagtagcctcggctattaatcttggtatatactcaagggcattcaataagtgtttgacttgtcttggaaagataaatgttgttggaaaaagtggtgtgttacaaagttctttctgtcttaaaaaaaaaaaaaaaaagacagactgggcatggtggctcatgcctgtaatctcagaaatttagaaggctgaggtgggaggattgcttgaggccaggggttagagaccagcctgggcaacatggcgagaccttgtctctaatatacttaaacagtcaaattaaaaagaaatcataaacgatctcccaaatgtaaacaaggaaatgtgattatgattttttactctgttttatttttattcacaataaacaaatgcatcaataacttaaatctcaaaaatatgttttcaacagattacaagtttagtcctcccattactatcttagaaacataattctggacaacaggaactagttttctgtgtctggaacaattcctggtaattttaagcccttcacacacaaaaatcaaaggaccagatgggattttagagtattttccaatccatattcctatcataaagcctagtaactgaagtcacaaatacaagcaaggtaattatctgattttagaaggcttccacagaattcacagaaatgtaatcccctactgattcaactgaggtcaaactcaacactagttcacacaggacagcaaaacaccatcattaccacttgtgtctgtacagtaaggagtgacctaatacaaaagcaaggtttgtggggcaaaaaggacacacagggaccttgtggcatgggcccagctgctcctgctcaccttgctctctgcccacttggcttctctgggcctcagataaatccccttataaaataagagtcctatgatgctatgttctttttcactttaaacttttttcaattttttctgagacagggttcttgctctttcacccaggctggagtgcagtggcgtgaacacagctcactacagccttgaactcccacctcagcttctggagcagtcaggactacaggcatgtgctgccacgcccagctaattttaattttttttttggtagagatggggtcttgctctattgaacagggctggtctcaaactcctggcctcaagcgatcctcccaccttagcctcccaagtgctgggatttcaggcatcagccactatgcctgacctaaagtcaaacttttaaaaggtacaatatattgtgtacctgttacacttccttcctgtattaaaggcaacccttcccagagatagtacttttattttacagatgaacaaaccagagctcaaagaggtcagatgtcttgaccacaaacagctaataaaaagaaaaagtgcaattcaattcaaattccagtctgtgttgttctcaaaaacattttgcgaacctgtcttaaacgaggacaagggaacaaactaaactacagagtggcaaagatccaaatgcacatctttccttcaggcagtataaggacagaaaaataggacaagatggtctcctatgctgtgggaaagacagggaaatcctcagaaaaatgggtctaaacacttgactcctaaaaatgtcatcataaatcctatcgtctccttaccaactaactgcgtaatttatcaggaaacactacttccttcatctatctagacttatcatattacaaaggtaccaagttatctacttgcaaaaataccaaatatggtatgagggaaatactcatacacagagtctgaggagccatccttaaaaattatggagtggggagacggtgatgcatgcagggcattaaactccccaccaaactagggggaaaaagcttcccaatttactaagttttaatatccctgaaaacattaggatttcatgagcaaaatatattacgctcattacatgtccattactaactgagcaactctattaaaatgagagatgagaggattgcttgaggccaggagttcgagaccagtctgtgtctttattaaaaaaaaaaaagggattattaaaataatattcatttcttgtcatacttggtattttttcagattttttccctcatgtttaatgcaaccactaggctctccaatacaaggaaagtatgtaaagcactgcttgtattcctggttaagtgtcagaaccacatacattgtgccataataatcctaagagtacccactggcattcctgaagcacttcagctagtgacaccattcatcaccctcaggcccagttttagagatgagaaaaataaagaagggccactagcctctccaggacacagatacgtaggtcctacaggtcctcaaaggggagagccccatatctcagtctttttattaatcatcatcacctccgccatgtctttgtagacattttttccttaattaccacttctcatgaaattctgataccacagatgaaaatacacatatatttatgtactgtactgtttatctgtgctttatgcatgaagagttgagttttgttttttcaccctccaagaaccaaatttcaatcctttgagggaaaaatcaagacctagctcattcactccaccaaatcactcagaacacacgtaagtcagaaactattaacaagttgggagccaaaagatattttttgatgtgttggttttaccagtcagcaatagatacaagggcttaataattttcactttatccctgttcttagcatttttattgctgggtgttaaacagaaacagaagttctatctgttgtaaagtttattccactggcctcattaggtacatggtttttgccttactttaaaaattctaaaactatacatgctcccacccacaatatcatgcttttgtattcaaaatctagccaacttgctctgctcctgtgtgggtacctaagtacaatggtgtgtgggccaatcttaaaaagggcagaacagccccccacctccagccaagctcacccaattactaatatgacaaatactgacagccaaataaagtactacagttaaatactaaaggctttcccattttgggggtagaggaaggaagagggctaagcctagggaatggaaaggaaaaaaattatgactgcttgaggtgggtaataaaaggagacagaagggagagtaagtgctctaggtgcccagcagaaagtataaaacccttttaaaagcccagcagacagtttgttctggacaccatatttcataatctattcctgtcacaaagtatgtgtatctgtttgatttgggggaaagggaaggctattttccatcccatagatctcctggtttctaattttaagagccaagagtcccattctcaaagatagggtagcacctcacctaaactatcttctttggtcaatgtgtgccctgtacccactcataaataaggaactgccaggtcacaggtcacctctaaaatcagttacagaggataggctacttttacttccacacagtctcatttcattttctgcttctaaactttctccatggagtatcttttctactctggaaagctatgtggattgtggtgaggagagtgatagatacactgtctattatttcaggaaaccaaaagtacaacaaatgcaaggaatgttatactctatttacaaaatgctttactaagtctcacgcttattaaatc[142 bp omitted]aaaccccatctctactaaaaatacaaaaaaattagccgggcatggtagcaggtgcctgtagtcccagctactcgggaggctgaggcaggagaatggcgtgaacccgggaggtggagattgcagcaagcggagatcgccccactgcactccagcctgggcgacagagcaagactccgtctcaaaaaaaaaaaaaaaaaaaaaaaaaaaaaaaaaaaaaaagtttggcattcctcaaggtttgctttttgatattgttctaactctacagtttcactttagaaagagccaacctctgcacaaacttcattgctgcctgtattctatttggatatgcccaaatctctgcagcctaaaccagcatatctaacagcccaatacatctctttccctctatgtctcacaagaaccacaaacttaaccataaccaaatggaactcagtatgttccaaaaaatattctatctcccatattaccttgcccaattaatagtacgcatagccaccaagctgccttgtacattgcctctactagtgaactcaaaccaactgggcttaaatcgccagcccatatccttcacagtagtggctgtggttttattacatacctatgtagacactcaacatgtttgagaaatgagttagtctctcctttagcaaacagcagcttacatttagtaaagatttattatgtaccagaattcatgacaaattaggccatttcatcttcacaactctgtaaggtgtataggtactataaccattttacagatgaagaatctaaggtccacccagaaaaaccagataccttgcccaaggagacagagcttacaagtggaagaggcaggatcggaacccaggtctgaccaattccagagtccatgtctgtaaccactatgtaaacttccctccctgtgttgttttataccatctttaatggacccccaaagatcatcgtccatactatttctgaccagtacgtcctgtaatcagtcatctgacaggtttctattagggttgtctattttctgcagctgtaggggatggaggtatttcagatttaagactattatggacaatgaactcagaataacaggattactctaaactgcttcacagacaagtatctagtacccaatctaatctctccattctatccaaacataaaaacccagccaagcagaaaaaggcagtgttttgaggtccatttaggaaaaaaatctactaactacttatttacttaggtcaattctcacagggaaaaagcatctctcatttttcagaagacagagcagtctgaaaacatcgaaattgtttttatttggtagttttgagcctaacacccaaacttctaatggcagaccatgaagagtaaaatcaaacgaatcttgtactggccacctttatttttaggacattctctggcagttctagtatcaaatgattgctataatgagaatatgtgagctccacaagctggcaggtgtccgacaccaaccccactgcagctccatctgctgcccacccagaggcttatgtttacagtgggaaaagtccatcaagggggcagaaacgaatggctcatcttacgctagatctcctacggttaactttctcaaaacaaaacaaacaaaaaacaaaaccccgaaacctctaaattagaaccatttaaatcttcctggacagaactttatatccaagaaattctaaatcctactttaatgaattctactttgctataaataatggtacagaaaagtcagctattcttttactcagaataaatcagttttgcatttttaataaaagtgaaacacagaagactagatggggacaggttattctggtgagaagatgacttaaaaggttcaccttatacaactgtggtagtaatggattgcttggtttaacttgaaaaggaacatctggtacaatctataccaaagcgaaaaagttcaaattaaagtacaacaaagaaaaaagaaagtacaatggaactatgggggatagaaagaaaatgagtgaaagaaaaaaaaccgccagtacaatgagtcattaaaagataaaatagaagtggttagaaacaattaataaccagtgggtgcccaggggttgctcaggagcaccaaaaagatgaacagaatggctagaggaatggactcacactcagcatgcccaacccaacccatcagctgcccatgtctcccttctattgaaattgcccatttctacctgtagaaataccatttttcacactatttctcctctttcctctctttcatagtcgtacctaatcacatatcaagtcttactcttcctttaaaacacatgtaaacataacaaggatgtttacctaagcattattttaatagcgggaggcagaaaggaaacaccctacaatgtccagtagtagaacagttaaatatttatttatagtgcattcatataatgaaataccttgcagccgttacaaatttcagagcagaacttggaaaaaaaaaatcatggagatgctgagcttcagccctgatcaaatcttatctgatctctatactacctttcaacgtttcgattatgtgagccaatacacacataactcgactgtgtaggctagtataacacattctgttaactgcaaataacagtggcttaacacaatgggaaaatgtttatttttctaaaaggcaagttatatacagtatggtctctacttttaaaatgcccaggacaggaatagtggttcacacctgtaatcccagcactttgggaggctggcacaggcaatcatttgaacccttgaacacaggagtttgagatcagcttccaaaaaaaaaaaaaaaacggccagctgccgtggctcacactgtaatctcagcactttgggaggctgaggcgggcggatcacttgagcccaggaattcaaagccagcctgggcacctgggcaacatggcaaaaccccatctccacaaaaaaacaaacaaaaattagccgggtgtggtagtgcatgcctgtagtttcagctacttgggaggctgacgtgggaggatcacctctgagcccaggaggtggaggttgcagtgagccatgatcccatcactgcactccagcctgggtgtcagagtgagaccctggctcaaaaaacaagaaagtaatccaacaaattttttttccctgaaataagccaatgaaaacgaaaaatacttcttaaatctctaataactagatcaccaataagcttaaggttcccaggtaaaatttcctgtgatatatactaacaaaaactcaaaaaagaaaaaaaaggaaaaatacgtgaggcttcagtacatgagggtcttacaatttagatgtgggaattctcactcaaatctatcatttatagggccacactattcttacgaggcacaaataaaattaaggcttactataaccaattcagaaagtctatggtaatgggatctagtgttgtcacaaaggttataatcagacccactgctctttttttccccctattcaggacagggtcttactctgtcacccaggctaaagtgctgtagcgtgattatggctcactgcagccgcgacctcccagactgaagcgatcctcccacctcagcctctggagtagttgagactacaggtgtgcaccaccacacccagctaattttttaaaaaaactttttgtagaggtaagagttttgctgtgttgctcaggctggtcttgaactcctgggctcaagtgatcctcccatctcagcctcccaaagtggtgggattagaggcatgagccactgagctgggccgttaccctctttttaagggagatcatgaggtagaaactgcctagagcagtaaagcctcagaagtgactcatgtttctcaaggttaaggctgcttcttgctgggaaatatgcataaagaagttaccttgtgagaaatgagttcagccctttattctttacttgatacagcagtgggcaaagattctaaactatccacagtacttttagtcaaactttttcctatggttttagcattcagtatcttcctttctccaattagataattcctaatttactcatttctgttaatgacaccaatatttcctcggcctcaaagccctggaatcctctggctaaacagaatgtctcatctaatcattaaatcctgttatttcttctcttaaaatactctttagatttttttcgttgttttggttttttttttgagatggagtctcactctgtaactgaggctggagtgcagtggcacgatgtcggctcactgcaacccctgcctcccaagttcaagcgattctcatgcctcagcctcccaggttcaaacgattctcatgcctcagcctctggagcagctgggattacaggcactcgccaccacgcctggctaatttttgtactttttgtagagacggagttttgccatgttggccaggctggtctcgaacccctgacctcaagtgatccactcgccttggcctcccaaagtgctgggattaaagataagaggcactgtgctcagctgttttttttttttttttgagacagagtctctcactctgtcacccaggctagagtgcagtgatgcgatcttggctcactgcaaactccgcctcccatggtcaagcgattatcctgcctcagcctcctgagtaggtgggattacaggcgccccccaccgtgctcagctaatttttgtttgtgtgagtgttctaagcagagatggggtttcaccagcttggccaggctgatctcaaactcttgacctcgtgatccatccgcctcagcctccaaagtgctgggattataggcgtgacccactgcgtcaggcgtttgtttttttttttgttgtttttttttttaaagataggatcttgctctgttactcaggctggagtgcagtggtgagatcatagctcactgcagtctcaacctcccggctcaaatgatcctcccagatcctcccacctaagcctcctgagtagcagggactacgggcacatgcaaccatgcccggctcatttttttatttttattttgtagaaacggagtctcactgtgttgcccaggctggtcttgaactcggctcaaatgattctcctgcctcggtctcccaaagtgctgggattataggtgtgagccactgcacccagataaatatgactcttttccatttccactaacatactccatcagcttgcctgaaacaaaactgcttctcatatacttgctgttttaagtgcttccatatttcagttagtttaatcctcacaatatctaatgagtcaaggaccattattatccccatttttccagtgaggaaattgtgacacaaagaagtttaaaaaaagaacaaaacttgcccaacatcatgatcatggcaaatggcacagccaaagtttgaacccagataagctggctccagcctaggtcctctgtatctggcctctcccctacttcaatccacactactcaaagtcatccttctaaaacacagctttggtatataaaaagaacatcttagaaatttaataattaatgattatcctcattttgcatcaacttacccctagacattcctaacctaggagttcacaatgcgacatatcaaaagtaacgtatttaaatgattttaagctggaacaggagtagcagcacaatgttataggaaaattgaaggtttctttacaccacagtccatgagccaaagatatgaaaatttaagaaggcaaaatataagaaggcatagtcaaccttatattgagaaaaactcccatttattcctttgctgctctgagctcagctgttagatcagaatgtgagactgagacaaggactctggatggatgggta[135 bp omitted]accgtctccaccaaaaaaaaaaaaaaaaaaattagccgggtgtgggggtgcatgcctgtagtccccagctactcaggaggccgagacaggataattgcttgaaccagagaggcagaggctgcagtgagccaagatcgtgccactgcactccagcctgggcaacagagactccgtctcaaaaaaaaaaaactgtttttgactatggctgatggtatttaagaacttactgactctgatgcaaatgtacctaccactaccagaaaaacaactcaaagcatatatatgttcctttgcttgaaggatggcattacttactcaaaacatggaccatcacagtactaagagacagggacactcaatgaatgaatgcttaaaagtgatgctcagactgactctcgaggtaatggctaaagccagggcccatgagaaatgtaaattcattattttgtggatatcatatggttagctgttaacagaggtcattgatgcaacgttcaagctccaaggctgccactaatattcatacaccccaaaagctggctactatgggcaaatttaaaaagatattggtgccttgttgactgaaacccactattccaggcctggaagaactgaaatgtcagttgatgaaaaaaattttcagaagtgtgtcaaatctgtccgcatgaatttcaatacgaaggctttccaaactctgactaagagagaatttgtaccacttgttccttctgacttcaatatcttgttcggtttggataccttccaggctggtacagctatgtttggcaccacaaagcatgccagccagccctagctgtgttgctaataagaggtcagaacgcgtccctggaaatacagagacacaattaagacttcaaacagctgtttgttaagccaagtgttctggcaaagcttgaaaaatagaaaaccttcccctcaatccagctcacttttttagcagcaaagtaaactcaagagagccatctgatgcgaagggactcttcttcccaggaggacttcagtcctctgcaaagctgttctttggcactttccctagggctatgggttgtgtaaactatgtaaattagaacgaatcttcacagttccttcaaactctccctgtgagttttattcttgttttttatacatccaaagaataaagaacaaattcaggtgggaaagccaatgtgttcgacacctcctttcatagttgatctttcttacccatgtttggacaatctactaaaatataatgccaccacgatgttggatggaacaaatgtccaaaaacaaaaactagtggaaacttggaatgtttattgggcagtgactttaagaaataaaagtgaggccaagtgtggtggcccatgcctgtaatcccagcactttgggaggccaaggtgggaggactgcttgagtccaggagtccgagaccagtctgggcaacatggcaagacctaatcaatacaaaaataaaacataaaaataaaaaataacactgattaagtattctttagatcgtaagcacagtaaagtgtaattatactttacaaagactcaagaaaaaagtagttaagaaatctaaccaaggtgctggcaaggaaaataaaggaataaaaaaaaaaaaattcaagggtttctatttctggtctgttgcctaaataaaggcaaaagagctgccgcaacgtaagaaccaagcctgaactcaggcaggacaacattgagtgacacaaagaggatatcaactatagactcagttcacactgagtaggatgaacatggtgtgaatttcctcccttcttgcctccaacacattaaactatgttgctaggcaactgtgcaagatgctgatagaggaacctactgtgaaatggagtaacaaaagcacactgtggcaagaggtacacaatggtgctcggggcagcaaaggggaacccgagggaaaagaagaacacccagaaaaccttctggagattgggtctgttctaagcaacgagaggtggccaaggcacgtaaatgctaaaggttacaccacacaaaaggaacaacatgactgaagaccagaaatacgagatagcccagtggtcagggaaaacaagcaactaactgaaaattgacaaaattttgtttaaatatagaaagtaagatcacccaacccattatttctgacattactggcaaaagcgttgaccaatggaacactgtagagctttctggaggaggatagtaaattatgcaaaactgtggtgcaagttaacacacagaattaaaatgagtatctacaataagagtaagactttgccgaagattatttgcgtaaaacacagttctgaaaagaaaacacaataattatggttttgctgaattcaaagaaatgctgcctctgctctctggatatgtctcagatgctgctgtctgcacatttagctcgagaccacattacacatccaatgacacaaggcacccaaattaaaagagaaagcactagactcaagaacatcttacaggccacccccgagcagtgagcctaagagaactcttatttccactagtgaagatgcagaacaaagtacaacaggtccccagtatctatctgcctctgcacaggctggaggtggaaaaggtgaagaaggggtttgggaaataaaggttcacaaggaaagggaacagtgcagacagggaagggactcatgagaacgggaacacctcatcccaattctacttctagtccacagcaaagcagtttactttccactcccatcccaattctgcccaagggcttcacctccaaagaccacaataatcaccaagagtttacaatgtgaagggaagacacgatttcctagcatttcaaagtggagcacaaaatacttcaagcacgaaaacagtgattccagaaacactggtgacattctacagcagggttgtccaatgataatttctgcatatgtcctatatctgtactgtccaatacaacagagccattggccactcacagccactgaaaacttgaaatatggctgcactggtgaatttttagcctaatataaatttaaatagccatataagctagatgctacagtactcaacagtgcagcttagagtactatgtaaatatcaggcacatggaagacaaatactttgtggtctaaacttaaaacactatcaatacgcattcgatgagaaataacatcttccacagaaacaccaatttataagcttttaaaaaataatttgtcactacaaaggaactatcaaagagctaaaagaacagatatttggctgggcgcagtaactcatgcccgtaatcccagcactttgggaggccgaggtgggcggatcacttgcggtcaggagtttgagaccagcctggccaacatggcacaaccaaatccccgtctctactaaaagaacaaaaattagccaggcgtggtggtgggcacctgtaatcccagctactcgggaggctgaagaaggagaatcggttgaacccaggaggtggaggctgcagtgaaccaagatcatgccactgcactccagcctgggagacagagagactgtctcaaaaaagaaagaaaatctactttcagagtatttccttaagcaagagtgaggctggaggcatgatgtttggaggtacttatctatagcctttcacagaacgtcaaagaagtgtcataagtattctgaagctcttcatatgccgtgccgctatcaatatggctcatgtctacttttataactctgccaaacacattgaaagacaatttaacttccaagtttaagtgttctaggacaactccaacatctcttcagagttgacagtaagcttggctaatgttagaaacaaaagtccccagtaagtcagccgtatctgcatggacaaagcagtcctgagtgctgctaaattaactgagaaaacttttcaacactcatgtcttactaagtctgtttcattcagaacattccatacacatctttagcaaagctcttaaaacagggtatttattaaatttcacatctttaattctgcttagtatcaaccttagcactaaacacagtaccctttgct[143 bp omitted]tgccattctcctgcctcagcctcccgagtagctgggactacaggcgcccgccaccatgcccggctaattttttttgcatttttagtagagacagggtttcaccgtgttagccaggatggtctcaatctcctgacctcacgatccgcccacctcagcctcccaaagtgctgggattacaggagtgagccaccgtgccctgccaggtactgatattcttaagaatttatcaaggccaggcgcagaggctcatgcttgtaatcctagcactttgggaggccgaggcaggcggatcatctgaggtcaggagtttgagaccagcctggccattatggttaaaccgtctctactaaaaatacaaaaattagccagacgtagtggcgggcgcctataattccagctagtcaggaggctgaggcaagagaatcgctggaacccgggaggcggaggttgcagtgagctgagatcgcaccactgcaccccagcctgggagacagagtaagactccatatcaaaaaaaaaaaaaaaaaaaaagaattcctcaaaatgctacatttggctgggcacagtagctgacacctgtaatcccagcattttgggaggccaaggtgggtggatcactttagctcaggagtttgagattagcctggcaacatggaaaaatcctattgacacacacacacactagccgagtgtggtggcacatgcctgtagtcacacacacacacacacacaaacacacacactctagccgagtgtggtggcacatgcctgtagtcccagctactcgggaagctgatgtgggaagatcgctggagcccaggagattgaggctgcaatgagccatgatcaatcacgccactgcactcccaacctggccaacagaacaagactctgtctcaagaaaagaagaaaaaaaaagctactactatcatgacattctcatataactctatatggcatatactctctgcacggcattcagattcatgcatttaaataattctgtttctttttcttgagataaggggtctcattcagtcgctcaggtttatagtacagtagcgagatcatggctcactgcatcctcaaactcctgaactcaagtcatcctcctgcctgagcctcctgagtagctgggactgcagatgtgtgccaccacgattggctaatttaaacatttttggttttttttttgtagacgggggggtctcactgtgttgcccaggctggtctcaaactgctggctttaagggctattcctgcctcagcctcccaaagtgctgggaatacagatgtgagccagctagcctgatctacataattctatcactatacttcttatgccaatcatcacatcacattctatggctgatctttcatgttctcaactggatacaaatccacaaaagctcacattattctttcctgtaattgctgattatgaattatgatgaatttcatggtagttaaatccatttgaacacaatcttcaggaaaaaaaaaagagagaaagtaattaaccaatagatctaacaacatctatagaagactctacccaacaacagcagaataaaaatctatctcaagcgcacaggagaacattctcaggacaaaccagatggtaggccataaaacaagccccaataaatctgaaagtattaaaatcatacaaagtatgttctacaactacaatgaaaatagaaatcagccgggcacagtggctcacacctgtaatcccaacactttgggaggccgaggcaggcagattaactgaggctaggagtttgagaccatcttggcaaatatggtgaaacctcgtctctacaaatatacaaaaagtactggggactggcc[141 bp omitted]gtggtgggcgcctgtagtcccagctactcgggaggctgagg[229 bp omitted]acggttaaaccccatctctattgaaatacaagaaatcagccaggcgtgtcggcatgcgcctatatagtcccagctacttgggaggctgaggcaggagaattgcttgaacctgggaggcagacg[136 bp omitted]ggctgaggcaagaaaatctcttgaatgcgggaggtggaggctgcagtgagctgagactgcactgctgcatttcagcctgggcaacagagggagactctgtttcaaaaaaaaaaaaaaaagattagtgaagcatgaacttctactgattgtcttgcacatagacatttttagcctgtataacataatttgtaaccaacgattataacttacatattgtaccatccaatgaaaagacaactctggtatgaggaggagtacccttccttcttttaaactttcctaaaaacctttcacaggccaggcaaggtggcttacacctgtaatctgtaatcccagcactttgggaggccaaggtgagaggatcccttaatcccagaagtttgagacaagcctgggcaacataatgagactccatccctacaaaacaaaacaaaacaaacaaacaaacaaaaactagttgggcatggtggtggatacctgtagttccagagactagggtgggaggatcaactgagcctggaatgttggggctgtactgagccatgattgtacctctgcactccagcctgggtaagagagccagaccctgtctcaaaaacataaagacagaccttcatagctgggcccagtgactcacatctataatccgagctacttgggaggctgagatgggaggatcactcgagaccagcctgggcaacatagtgaccccccgctacaaaaaaaaaatattaaaagttacatttttaaatataatacagggtgtggtggtgcgcatctgtagtcccagctactgaggagactgaggtgagatgatcacttgagcccaggagttcgaggctgcaatgaactatggtggggccaccgtactccagcctggggtgacagaatgagaccccatgtttattgcaaacaaaaagtggccaggcagagtggttcatgcctgtaatcccaacactttgggaggtcaaggcaggaggactgcttgaggccatgagttcgagatcagcctgggcaacatggcgggatcttgtttctacaaaatacaaaaagttagctgggcatggtggtgctcacctgctgtcccagctactcgggaggctgaagtggatgaagtgcttgagcctaggaagttgaggctgcactccagcccaggcaacagagcgagaccctgtctcagaaaaaaaaaaaaaaaaaaaaaaaaaaaggctgggtgtggtagttcacgcctgtaatcccagtactttgggaggctgaggcaggtggatcacttcaggtcaagagttagagaccagcctggccaacatggcaaaaccctgtctctactaaaagtacaaaaattagccgggtatggtggcacacgcctgtagtcccagctactagggaggctgaggtggtagaactgcttgaacccgggaggcagaggttgcagtgagccaagatcatgacactacactctagcctgggcaagagagtaagactctaaaaaagaaaacaacccacgaagaaacaaacagcaaaacaaaaacatctttcaccttgtgacagacttcagaacaacccccaagtctgctggtgtgtcttcccaggtcgattctcatttgccaggccttccaataaacctttatgaaatcatttctgcctcaatagtcttagtttcagttgacaatataaatcccaaacccaggccaggtgcagtggctcacgcctgtaattccagcactttgggaggccgaggtgggggggaggatcacctgcagtcaggagttcgagaccagcctgaccaacatggtgaaacaccgtctctactaaaaatacaaaaatgagctgagcgtggtggtgggcagctgtaatcctagctacttgggaggctgaggcaggagaatcacaggagggcggaggttgtagtgagctgagatctcgccaccgcatttcagcctgggcaacagagtgagactgtctcaaaaaacaaacaaacaaacaaacacccaaacccaaaagcaagttacacaagaataatttttcatgtggtcacctgaggatatgcgggtgagaggcatgtcctttttgccaggcctttaatatctaacagggaagggatgaagtgagagaaaaacatatagaaatttcacacatgaacgtacaacactaacaaactcatagctaaatatgaaaattactactaagaactttaaaggtaacaactgttcaggtgggtgtagttctagtacaagcttaaacatggcagattggacaggcctctgagcagatacagtgtgactttctccaagtttacgaacaactacagtattagttcttctgtactggtaacctaagtatagaaggagacgaaccaattaattaagggaaggcttgtacggtctaccagttctcacttctagcattaaatgaggccattagttacaaattcactgggatatatgacgtggactacttcagcacaatgttttggaaaattcacacaaatttcggttcacaatctattctgattagctttaatatgattttgagaaaagtcttaatcattgtatcttttctaagagcctggcacagaaatcctctgagctactgccactttctaaagaggtacactttaacagaaatgccattcttctctccaaagatgaagtacctgcttactttcattataaaattttgaatatggtttcattgttatgttttatggtacccaggaactgcaataaaagtaactatggctatatgcattaaacgttttttctgaaaggttatagaaaacctgaatagtgattttctttgggaaggtttgtcatataaattttctaatgatgagtgagacatttatttatttgcttatttaatttcaaaattgttatctgggcatcaggagggaattatgacctaatttattttatgctttttctattaaatgattctaataaaaattttaaaagaattaaataaagaagacacttgatttcttaaaaaaaaaaaaaagaaagacagggtcacacactgtcacccaggctggagtacagtggggcaaacatagctcattgtagtctccacctcctgggctcaagcagtcttcccaccttagcgtcccaagtagctggaactacaggcatgcaccaccacacctggttaattttttttatttttagtagagacagggtcttgctatgttgcccaggctggtcttgaactcctgagctcaagtggtcctcccacttcagcctcccaaagtgctaggattacaggccaccacacctggtcacttgatttcttaatgcatgatagatagctaaaaacccactattaatttcagatctttgtcttttaattatacttttcaaagccaagcattttataaaagttgatacataataaatagaattttgactggagctaaaaatgcaggaaagccaaggaaggagaaatggaaacatgaacctctggaaaactgcaatttgtctcattagtaattttaatgcagtgtggagactgacctaagtcaaaagtacgtacataagaaagcatataacattactttcacatcccatgtggggaaaagataactgagatataactagaaatctagatagcaagaccagttttagcgccaatttgtttattcgtagagaaaacagctgaacatgtcatgtttctagtttatcttattagattctacaaaatttctatgtaatagccttatacaggtggaagatgatgtactgcctacaccaagaagagttttaataggaaacaaatttgctccatgaagctgtgcacagtgattttttctttccttattagacagcaagacggccctaaaatatttgttgacctgcaaactgacatctggaaaactactgtagtgtttttgttttttactgctttttctgattacaaaactaatagcttgtagtaaaaaaaaaaaaaaactattatagaaatgcaccatatagaaagttaaagttctccataatccctacatccagagaaaaccaactgttacccaacatcacactcttcttttttctttatattgcagtatatgtgagtaaggatgtttcattaagttacaatacttgtttctcaaaagctctcagcagagcctcctggcttaaagctaaacatttgcagcataaactaaacaaagactggtttgtctgtcttcccatcttgttccaagcatgagttaagatggatggtcttcctctagaaaatattcatttagctcaaagacaaattaaattatgaatacatgccatatttctctatcataatcacttattaatttaacctgacaaagctataaaaaaaggaaattaaccacttaaaaaatagcacaaaataaaatgtgcggcggaaaaactgtgtcaagcatcttacatgctgagggaaggatgtttaatcatctcagaaatctggttaacatagtcctataaaacactgtcaaactttgaaataatgttctattgttaaaggagactagagaatgaagcaaacattagctgtgctattattatgtattctggttagggattatgggccattctcacttaaggtcatcttaagtaggtaaccatttgttcagccattcagacaataggacaatacatatatcaaaacctcccttgagattacgaactaaattattaacagaaacaagtgaaatatacagcaatagggaaataattaagtcaattacagaacattaacttgatatgttatacaaccactgaaaataattagtaaaactaatatggaaaatggtaacattttaaattcactacaattacaggattataaaaatgtatacataatgacaatgcttaagagagatctgaaatagtaaaaatactggaatagagggacttattgactttcctatctattaatgtaagctaaagtaatttaaatgttacagtgaagtggaaatactgctaataaaataatctattctttttccccagcattccttttcaaactccttttcatagttatgtatgaaaataaagatacggctgggtacagtggctcatcccagcactttgagaggctgaggcgggcagatcatgaggtcaggagttcgagaccagcctggccaacatagtgaaaccctcgtctctactaaaaataaaaaaaaaattagccaggcatggtggcgggcacctgtaatcccagctactcaggaggctgaggcaggagaattgcttgaacccgggaggcagaggttgcaatgagctgagatcacgccactgcactccagcctgggtgatggtgcaagactccgtctcaaaaaaaaaaaaaagaaaaaaaaaaagaaaataaagatatatgaaataatgacatgaaatgatcaacacttcccaaaaacacatacccctttcttgttctcagtgaatcctacagtttcagggtccaaaatacattttttctcactttataactaaactaaaagctcttgcatttttcaaaagaaaaatgttaccaagggcttttgccattttgttaaacctagattttaaaagtcctgggttcctgtaatcccagcactttgggaggctgaggcgggtggatcacagggtcaagagatcgagatcaccctggccaacatggtgaaacctcgtctctactaaaaatataaaaataagctgggcgtggaggcacgtgcctgtagtcccagctatttggaaggctgaggcagaaaaatcacttgaactcgggaggcagaggttgtggtgagccgagatcgcgccactgtactccagcctgatgacagagcaagactccgtctccaaaaaaaaaaagtcctgggtaatgtatcgagaccttgtctcaaaaaaaaaggaataaaaagtccactattaaactaaagaataaattagttgaaaataaaagccactgttaaaacgaagaaaaaaactttcactatgttactgctaataattaatacaggttgtatatcccttaactgaataagcgaccagaggcatttcaaggtttctggattttggaatatttgcatttatataggttcagcatccctaaatctcaaaatccaaaatgctccaacaggcacttcctttgagtgccatgctggcgctcaaaaaagtttcagatttcagatctttggattagggatactcaatatgtagttcttttgataaaaatgttaggacagaaagtaaaagaactactgctagaaaccagaccaaggtgggctaaactttctagtaaagaaggaaatactaagcattatctatggcatcctaagatttttatttatttatttatttattttagacggagtcttgtgctgttgcccaggctagagtgcggtggcactatctgggatcactgcaagctcagccttccgggttcacgccattctcctgcctcagcctcctgagtagctgggactacaggcgcctgccacc[184 bp omitted]cgcctattctcattattgagactagagagaatgtttacccatggcttctcactgagggcagttagagatactgaaatcgaccttaatatccttaaagtaaatactatgagtttttcccaaggctgttttttcaaacattccttactgttagccaattgcacaatcccaaagcttcggtaaactacagaaacttacaaaagaggcccccagtaggacacagcataggtatccatctatttgctatagatgtgtaagaatggagaaaaactctccatcaatactgtgctttcagctgagctctgggacagggctggaacagttctgagtctgaggtaacagcagataacctttggccacttttatgcgtagagtcatgtgactcaatagtttcctgaacccgggatctggactaatcacctcttatcaatgctgtgtactgaatagcattaataaaactaaaagctagcaattactgtctactttatgctagttactgctttaaaaacaccaacataggctgggcgggtggctcacgcctgtaatcccagcattttgggaggctgaggcaggcggatcacaaggtcaggagttcgagaccagcccggccaatatggtgaaagcccgtctctactaaaaatacaaaaattagctgggtgtggtggcacgctcctgtagtcccagctactcaagaggctgaggcagaagattcgcttgaacccaggaggcagaggttgcagtcagccaagacagcaccactacactacactgcactacagcctgggtgacagagcgagactccttcccaaaaagaaaacaacaacaacaaaaaacaccaacatattggctcttttagtcttcactatgaccccaggaaggtaggaaactattgttcccattttacagatgtcagaaccaaaacacaaagccatcccgtaaattgcccaagatcgcaatgcccgatctgtctgtgacagagctaggattccaagcaggcaggtctcgcctagagccagtattctttacaatacttcagatgtctctcattccacatccagaaggaggtaaaattaagggagtagctgccaaaaggacgaaggttttcctcaaaaagtcattttgggtcagtttttcaaatgtctcaaagttttatgatcctgagcacagtcacagtgaacttcagcctaagatttaaaatcaggttaaatctcaacgcttaagaaacaaaaccactcctcagcagagcacttcaccttcctagaatatccttcaaggtaaactagatgcagaatgtaaactgcttactatctgaatgtaacttttttcttttaataaaactgatagctgggcatggtggctcacccctgtaatcccagcactttgggaggccaaggcgggtggatcgcctgaggtcgggagtttgagaccagcctggccgacatggtgaaaccctgtctctactaaaaatacaaaaaataagccgggcgtggtggcacatgcctataatcccagctactcaagaggctaaggcaggagaatcgcttgaacccgggaggtggaggttgcagtgaggtgagatcacaccactgtactccagcctgggcaacagagactcttgtctcaaaataacataacataacataaaataaaataaataataaaactgatacatatggtaactaattcaagagtatgaagagtaaaagtcacctgaaattcagttacttggagacaacaattactccttgggagaccattcagaaagagatctatgtatatgataaaaaaagaggaaaagacagcaatttttcctaaatggcctctctctctagtttgacctcatttgtgtatagaaaggctttatttacagaggccgggcgcggtagctcatgtcggtaatcccagcactttgggaggcaggcggatcgcttgagcccaggagttcgagaccagcgtgggcaacagtgagacctcctggctctaccaaaaaaaaaaaaaaaaaaaaaaaaaaaaagcaaacaaacaaacaaacaaaaaaacccttaaattatccaggtgtggtagtgcacagctgtagtcccacctattcaggaggctgaagtaggaggattccttgagactgagaggtcaaggttgcaatgagtcaagatcatgccaccgcatcccagcctgggtgacagagcaagaccctgtttcaaaaatgaaaataaggctgaccgtggtggctcacttctataatcccaacactttgggaggctgaggcaggcatattacctgcgttcaggattttgagaccagcccggccaacatggtgaaacactgtctctactaaaaatacaaaaattagctgggcatggtggtagatgcttgtaatcccagctactcaggaggctgaggcaggagaatcacttgaaccacggaagtggaggttgcagtgagctgagattgtgccattgcactccagcctgagcaacaagagtgaaactccatctcgaaaataaaaaataaaaataaaaaaagggaaaagaacaaaagaacataaaatcaggactaaaccagattggatctgaatcctaacttgtgaatttgggcaaattaagcctcagattttttgtcagtaaaatggggataacagcatctgcctttacaagatttgcgtgagattaaaagagaagggaagttgaatacttagcttagagcaaaggcatgctaagtatttaatatgttagttatattattacttattaaaacaggatccatttaaacgtttctctgtgcaagtgtaggcattattctgtgttgatacagatcaacgttaacaccttcattgccacttaataggtgccataatctacctctgtaaaccccactaattggttttgctttttggcttgtatggcaatttcatgaactggaaggtgcatgccacttttatgtgttttaacatctctaaaatgcatcttacaattgacagtattggcagaaaaaaatttttctaggtggtatatacataattgaaataaacatccttatgtctacatctttaaaaaacttgtttatgagtttcttagaataaattctttttttttttggagacggagtctcactctgtcgcccaggctggagtgcagtggcatgatctcggctcactgcaacctctgcctcccgagttcaagcgattctcatgcctcagcctcctgagtagctgggactagaggcacacaccaccacgcccagctaatttgtgtatttttagtagaaacgggatttcaccatgttggccgggctggtcgcaaactctgacctcaagtgatctacccgctttggcctcccaaagtgctgggattataggcatgagccactgcgcttggccttagaacaaattcttaaaatgttacttgctggatcattttatgttctgatacctattaccaagccaccagtgagaaagacaatattggtaaaaatctccagagacatgggaaagtggtaaccatttcttcacactgtagccagcaaaggatggggtcaatctttgttatctttggtaatctgacatacaaaatgacaaacttactctagacaggaagtccaataaatcactcatggaagcaatgccaggcagctgaacaaagcaagactactgataccctaacatttctggtctactcatacctggacagttaagaggggtatccatgtattgtgatgggtacacccagtacaccacagcaagacctaagatcaaacttcacctctgtcacttgctagatgtgtgaatctgagcaagtttcttaagctttgagcctgtttctgcacccataaaatggggttaagaatgccgatcttggccaggcgcggtggctcacgcctgtaaccccagcactttgggaggctgagaggggcagatcacgaggtcagaggatagagaccatcctggctaactaaaaacacacacacacaaaaattagctgggtgtggtggcgggtgcctgtagtcccaactaatcgggaggctgaggtaggagaatggcatgaacccaggaggcggagcttgcagtgagctgagatcccaccactgcactccatccagcctgagggacagagcgagactccatctcaaaaaaaaaaagagtgccaatcttgcccaggacggtggctcaagcctgtaatcctagccaaggtgggtagatattttgaggccaggagttcgagactaacctggccaacatggtgaaactcacctctactaaaagtacaaaaattagcagggtgtggtagcacgtgcctgtagtcccagctataggctgaggtgggaggatcgtttgagcctgggaggcagaggttgcagtgagctatgatggcacctctgcattccagccttggtgacagggggagactctgtcttaaaaaaaaaaaaaaaaagtcaatatttcagcatt[132 bp omitted]aaaaccacatctctattaaaaatacaaaaaattagccaggtgtggtggcgggcgcctataatcccatctactcgggaggctgagacaggacgatcacttgaactcaggaggtggaggttgcagcaagccaagatcgtgcgattgcactccagcctgggcgacagagtgagacttcgcctaaaaaaaaaaacaaaacaaaaaaacaaacccaacaacttagaagcaattctaccatatggtttagaggtgaaactgaaagattctgaaggaatactacatttccttactcatttctttctccaaacaggaggaagaatcatcttcagccagtctcccaaaaagaatcttttataggaaatgaaagttcattctcagcacctatttggaaatagtccattcagctgacaaaatgaatataataaaaagcaagcagattatttgctttaagagcactcaaacaacaaactgctcccttccttttttgtttttgtttttttgagatggagtctctctcggttgcccaggctggagtggaatggcacaatcttggctcactggaacctccacatcccgggttcaagcgattctcctccctcagcctcccgagtagctgggattacaggtacgcacgcgcaccaccgggcccggctgttttttgtatttttagtagagatggggtttcaccatgttggccaggctggtctcgaactcctgacctcaaatgatccatgcgcctcggcctccccaaagtgttgggattcaggcgtgagccaccacgcctgaccacaaactaacctccttcttaaagattaaatgcaatattctggtttagtcaacaagattgataagaattcttaccaaaaggcaaaggctgggtgcaatggctcacacctgtaatcccagcactttgggaggaaaaaataaatggttctacagagtatactgatactaggactttaaaatagtggggggggggaagaaaaacacttttttttttttttaatttggagatggggtctcgctttgttgcccaggttgggctccaactcctgggctcaagcaatcttcctctctcagcttcatgagcaggtggggccttcaggcttgcacgagcatgcctggctttttatttagattaggtaatttgaacccctgaaatgggacttgtgcactgaaactcaggacttataacttgtgaaaactctaaccaaccaaactagggattggctctccactgatcttctccattgaggatcataatcaaagggcattcctttcttaggagacttattaaaatgcccctatctgacaggcagaaatcccatgattcttgctttcagtatctttcaaaccactcccctccttcatttctagtatcccaggttgatacagacacttgacacacaacccgattacttgccaccatccaggcttggggccccagccttgcccccttgcaattctttatacacacacacacaatgctcttcatcgctaaaaaccttccgaggcttcttaaggaccagatcaaactcttactgggcttttctcacctcgctccaactctaccttattttccactatgtcagtctagattcttattccagccttcctatctcaaacacaacaagcacaagtttcgtctcccttgaaatgtcctccttctcttaacctacacgtcctgttctcctacaaggttcaagtcacaactctgcacacacctgactgatgtcagcgcttgccagtttcatccttcctgaacgactctagcagttacagtgtgcaacccgactcaagtataccatcaaatactactaagaatcactactacaaatcactaccaagaatgatagttgtgtgatcttggatagatcatttaacctatatgggccaccatttcctcat[321 bp omitted]caaaaaaataaaaaaataaataaaaataaattttaaaagatcttttcctgttctaaaaaaatttttatataccatcttgtactgtttcacatattaatctcaattctcttacttgagattttggagcttctgaagggagaaagtacatcttatatttctctcccaactctcaaagcaacttatcccagtatctggctcaagagatgctcagtcagtgtgacactgaaataggccaggcagtgctgagacagaatgctttgaagatctcaatgtgaactcaagacctgtttttaaagtagtttaagaaactggtaaaggtagttagtgccagagagggtagaatacacctagatgatccaggctggctctccactagagctgaagaaagcaagaggctggctctagaatggaatgagcacagatctgagagctcaaaatgggtctcttaattcctataagcacagtttgaagtatgtatacataagcccctaaatggcagttgcaactcctaggtaagttttatgtgctctagtgtagactatttaggggtcttgtcagtggagaacctctgggactgtctcaagcctgccctacaatggtgggaggaattctgatgtattccaaccacaccaggcctgaaacctgcagtggaagggcaattccttctattttacatcccagtgtcctctccctccccgagccaagaaaaacacaagcttttataagagagagaaacaaaggcagacatattgaaccattcaactctattttaggcttccagtaaaatgcttttattttttcctctttttctctggacagtaacaggtcaatgtgtagacagaaagtagggaaggggtctgctggaggagaggagtcaccatttttaactaaaagttaaccaggaactccaagacaggagaagatgtgatccttctgaactatagacagaggatgaaggctaagtgcctatttcattatcttgaaatgaaacttattcaatatccatatgcacgtctcctttatcaagagaaggcatatatatgcctatttcaatgaaagttaaattgttcaatgctattccagcaacttttaaaacatgttttggcttacaactaataccctcaagacgtcccaaatcaaagcaattcaaatgaagccagtttacttcttgaagaatcaaatgaggaaaactccgtttttttaactaacagcttttaagaaagcatgttcctcctcttcacccagccatttcacacagttatgagacaaagggcaactactgtatcgtcactcttttttttttcttttggagtaaagccacaacattaccaacaaacagctaatggccaccgttcaaaagcaataatggcattatgacttcatatctcagttatctaccaaattgaaaagaaccacatatatgtatttttctctctcctcaaagaaaatctaaaagtgaatgtgagtattctgatttactttctcctccataataaaaatttctgagggactgttaaacaggatcttcttccctaataataggatgggaaagaaggtttttacacttgctccagaatttactaatttaagttaaagaatttataaaatgttcatggtctaggtctaggacaaacttcaaagacagaa[138 bp omitted]aaa[139 bp omitted]gcactccagcctgggtgacagagcgagactccatctcaaaaaaaaaaaaaaaaaaaaaattcttaaaaagagaccgcatgcccctagttttgttttaatttgttgcttcagtgcttaatgtgcaatgggacagatttagagaaaaatatgaaccaccagccttctaggttcaagtttctaagataaacttatgaaaaaatctaagtttgtatcaaaaacaaaaaatactagcccaaaagggcttttgtacaggctatagatgtgggcatttgagtagcccatcttataccatcacaagtgggttatctacagaaaacagtaatcacctacagaaacatcaaattacctctcccatacaccaatgaaaactgaggaattttgtagtctaagttaactttgccctgatctctagctgggcatattttctctagttcaagaaaatagaaacctagtttctagaaaatggttccgtctgctttctgacaatttagtgttgactttgagaataccctcgaaaagtgtggtgtcacaaacacagctttgaaatgaacacacagacacaaagttttcttctctttaaagggctctgcagcatcatcttctatgaggctcaacctacatttctaacattaagaaattactgggcagttaacttcagagtagaactctacgccttgggcaatgagggcaaaataaagactatcaataagtccacataacttaaaagtaaaaagactgcacgtccttttataaagaaccatatttctacatctccacttgctttctcttcataaaattctaagaatttcattcaggggtagtaaacaaatgaggtagcaaattccaacaatcagtctaaggctcagaaggaaaaatgtcaaaacttgagacacagggaacactcaaacatgaagcttcagcctttcctcctttaaagttaacatactctttgataacactcatcctcgttaaaataaattacacatccaaaagagcaaactgctacagtcaattgggtaaacaacataattaacatgtgctgggggagagcgaatcctcacataaatagtggggctcaaaataagctgcacatggtatagaagctgatttttaaactgtcagcaggtttcttttcgtgcaattagagtttaatatggggtaattgctcctcaagtttcttttaagaaagtcgaaatctgacttgtacaatagcaggttgcaccttattatttagaactccatttgttttttcacaaagaataaaaatacactgaagttctttaatgagttttggtatgtacttctaacaacctctctaaactgggaaaattaatttctaacctaccaaaatcatattccagaacgcaaaatcctttggctatacaaagtaagactaactgaatgcttttacataaatacttcaggtctgggtctttttaaaaaatgctatttttaaaataaaactctacagggcaaatcaatctactcatatacttcctttctacaatcacattactttgactttacttgaaatattaccagtatcaacagacaaatgaggcattcacacaaaggcagttaaacaccacacatcacaccaactcacttaagtcatatttaatattctactcagcatctaaagctctccagaacaaatatgatggtaaatgttaaaagtgtacaatgaaaaacacagcttctttgtgtgtaatcagggcgaaagaaggtgggtgagcacagggagagcgatctcagcattgtgctcggcatcagcacttaccttgaggatgtccccccttttgaagctcagctcgtcgtctgcagtagctttgaagtcatatttggcgatggcttccattctgagcgctgctcagtgctcagcagcctgaagcagggggaagggagtcttccctgctgaagcaacccagcgctctgggcttagcctcgcctctcttctgggactcgctccggcactctgggacacacaatgccaccctgaagcaggagagggacgattaagagcagtggccaggattgaaggcaaccccgccctgccaatcggcctgctgtcccagcccccacgccccctggctcggcctggctcagccctcctccctcccttccaggcaacagcccccccccgccgacttcttcctcttttcagcctcggcccccaggcgactgacaggcctgccggccaatggcacagctgcctgagctattcctgaacacacttcctcttccttcccgctgggtgtgcactgcgtgcaggaaccggctggagtcccactcagtctccgcctttcctcctttactcctcacaggctcttctccagcaccaaatacggtccactgaaaggaaggcctcaccctggggatggcacctgtctcttctcggttaaacaggcctgtctccctcccttccccaccgccatcctttctggtcttctgagaatgctggcttccctactgcacagtcaagagcaagcaaagcaaaactctttggtctcgagctgctgcactcttctcgaaactaaaccatgatctgctcccaggagagcaggagaaagtaaatgtaggaactgctttttcaatccatttactgctacaagcaccggcggctttccccctgcacttccatgttgtgatcggcaagctcaggtaaccagagaaagatcacagctccaagctgtgtaccagtggaaatggtggggatgacgctcttgcataaggctccctttccccggcagatccccaagactctggggtccccaccaggaatgaaataaatgaccaaggctcagcactccagaaatagctccacattatttctaactaacctaaggagcagagctgaagtcctaatctacacttgaaaggaatccctttttcagaatctgagctgccaagtatcttgtttgggaaagaaagtgcagggagatggtgcccgcagaaggtcaaagagaagtctctctcacagtcaccctgtgcacagcttcttagagcaagcagagtataaaactgatgcaaactgcattttgcaggtaaaagattctgtgagaaccctgagatactgtatcagacgatgaggaactggcagtagtacaatgaacggtgtagtgaagcgtctccagccatgaatataggacacaacctagatctgtggataactaaataaaaataaagccccgttctggttagctcggtcactgttttcatacttgctaaacaaaagcagaaaacaacagaactgggacagattatttatagtgacacctttcttggataattacaacccagcagctcatttgaggggcacaagtgattattattcctttgttctaaagttgacaattggggcactaatcaagcatagctgcaaatggaccaagtagtaaagcagtggggaatattaagattagaccaagataagtattatcaaaaagaaaataaatcgtctgacaatgagtccttcagtcaaattctgaaagccaaacattctgctgcaggtaactaataaaccaaaccaatgtttattccttcaggccatacctaagatattccatgtggcgctggctgtaacagggaaagtaaagaaagagtcccagcaaatattaaaaaatacagaggttgatctgcgaatatttatacttgtgtatccttaaatgcccttcacttacactctctgtagttactttgatcaaactaatccgtgtacataattttaaaagtcagagtattaaaaggcttatgaaaaagagcagctccctaccaacacccacaggcgatcactctcgattttgttttttgctttctctttgtatttacttatttttctttttttaaatcttgtggtcaatgcacaaaatggatagagtatttctaaagaatgtgcttttactgctttctcagtttattccagccattatctattgcctgaaaggtgaagatttagtttcccccgacctataccagtaatatcacatattctggtttaatcagtagtatgttatgaaatactactcactgataatttaaataatgcactaaaaccaatcatactttttgtgtttttttttttttcttttttgagatagagttctctaagattgcccaggctagagtgcagtggcatgatctcggctcattgcaacctccacctcccaggttcaagcgatcctcctacctcggcctgtagctgggactacaggcatgtgccaacaagcctggctactttttatatttttagtagagacgggatttcaccatgttggccaggctggtcttgaactcctggcctcaagtgatccgcccactttggcctccccaagtgctgggattacaggcatcggccgctgtgcctgacccaatcatacttttttgtacaatccttagatttttcccagcattagcaactgcttaatgttctattttttacttgcctagttccctgtgtatctacttttactttttcttttctctttttttttgagacagggtcttgcactgttgtccaggcacgagtgcagtggcatggtcatggcttactgcatccttgatctccttggctcaagtaatcctcatgcctcagcttcccaagtagctggaactacaggtgtgggccactatgcccggctactttttctattttttgtagagacagggtctcactatgtgagaccagtccagtatagcttagtgttgaatttgcatggtctctagaggcaggcccctcacgctaactgctacaattttgggcaaacttttcaaacaagctccagtttcgtcatctgtaaaatgagaataatatctaccttttaagacccaggctggtctcaaactcctggcctcaagcaatctgcctgcctcggcctcccaaagtgctaggaatacaggggagagtgagccaccacgcccagccctatttttacttttaatgaatgctccaaaatctctcctactatcaagattttcctcagcctatttattttaactggtctctaatgccgagactatgtattagtgataggaagctgaagaatatttacaatgataggaaaagaataaggagttttatttttgaaaaacagaaatcagatagaaatgaaaagccctgtcactttcaaggtgctatgtagtacgaccagccataagcttctgtgtcattcaggatttaagacagctgcaatgttactactcaacagcagtacaaaaaccaagacagttctcaatacctgctttcctgctgctactcagctcatctgctgaaagcttaaaaagaataaccttcttgaaagtcgtgttttgagtaactattgctttgtgagatgcagagtttgacagaaaattaaatccctacttccatggctgtgctgagtaaaaaaacagaaaactcaaagaggaaagcttattaggttatccacccaaaagagcatattcgctaaaggaattccaaagggtgtgtttcagtaaagacaaaaaaaaatctaacacatacacaacactaattactaaaaggaagaaatctgaaagcagacacaatgtataatgattttaacagagtagatgttgctgttcacttcccaagaaaatggggtatagtgtacttaacactgaagcctaatgagagtaacctcgaaactgttaccagcccatcccaagcagtgaattttaagaaaggtaagtacagctttaatcattcatttcaaacaatgtctactgtatccaaaaaaactactatcctaaaggtatttgcaagattttttttctttcttccatttaactctcttcttcccaaaattcacagaaaataaaatacatgacaacagtccagtatagcttagtgttgaatcttcatggtctctagaggcaggcccctcacacttacagctacagttgtgggcaaagttgtgaaacaagctccagttttctcatctgtaaaatgagaatatctaccttataagatccactgaggattaaattagacaacatatataacatacattaagtgctctggatagagcccgacatgtaataatcactcaaaatttatttatttatttatttatttatttatttatttattttttgagacagcatctagctctgtcgcccaggctggactgcagtgtcacgatctcaggtcactgcaacctccgcctcctaggatcaagcaattctcctgcctcgacctcccaagtagctgggactacaggtgcgcgccaccaagcctggctaacttttgcatttttagtagagatggggtttcgccatgttggccaggctggtctcaaactcccacctcagcctcccaaagtgctgggattacaggcatgagccactgcacccagccttcaaaagaaattttaaatgttactctatttaaaacatatgaaaagaaatgcaaattaaaacaatcagagttttcatatactaattggcaaattttaaaaatatttataaaatccaatctgcaatactttgagtaaacacacttttatttatttatttatttttcagaaagggtctcactctgtagcaaaggctggagggcagtggcgtgatcttggtttactgcaacctccgcctcctgggctcaagggatcctctcacctcagcctccttagtggggactacaggcaccagccaccatagcctactcatttttttttgtagagatggggtctccctatgctgcccaggctggtctcaaactcctaagctcaacagatctgcctgccttggcctcccaaagtgctgggattacaggtatgagccaccgcaccaggcacaaagactttttaccctacccggtgtccactgactcaacattttgagaagttactaactgacaatgtggcttggtgttacattataataataaaatcaccacagaacccacactacagcaaggaattaatgagctcagctcaatctttttggtgagttctttggtaatctattgacaacttttatttatttttatttattttttggagacagagtcttgctctatccctcaggctggagtgcagtggcgtgatctccgctcactgcaacctccacctcctgggttcaagcgattctcctgcctcagcctcccaagtagctgggattacaggtgcctgtaaccatgaccagctgatttttctatttttaatagagacaggatttcgccatgt[135 bp omitted]gcccaggctgaagtgcagtggagcaatcatggttcacttcagcctcaaactccttggctcaagccatcctcctgccttagcctcccaagtagctgggactacaggtgcacaccaccatgcctggctaatttttgtgtgtgtgtgtgtgtggtgaccaggactcaccatgttgcccaagctgatctcaaactcctggactcacgtgatcctccccatctcagcctttccaagtgctgggattacaggggtgagccaccacacctggccttgacaatcttttcttttttttttttttttttgagatggagtctcgctttgtcacccaggctggaatgcagtggcacgatcttggctcaccacaacctctgtctcctggattcaagccattctcctgcctcagcctcccaagtagctgggattacatgcccccaccaccacgactgactaacttttgtatttttagtagaggcagggtttcaccatgttggtcaggctggtcttgaactcctgacctcgtgatccacccgccttggcctcccaaagtgc[139 bp omitted]ccattctcctgcctcagcctcccgagtggctgggactataggtgcccaccacc[138 bp omitted]cccggccctgaccgacaattttgaaatattaatacatactctttttttttttgagacagggtcttgctctgtcacccagtctggagtgcagtgggtgccatcttggctcactgcagccttgacctcccaggctcaggccatcctcccgcctcagcttcccaagtagctgggactacaggtgtgtgccaccacacctggctaatttttgtaaatacatactcctttttttgagatggagtcttgctctgtcacccaggctgaagtgcaatggcacgatctcagctcactgcaatctccgcctcctgagttccagcaattcccctgcctcagcctcccaagtaactgggactataggcgtgcaccaccatgcctggctaatttttgtactgttagtagagatgggctttcactaggttggccaggctggtctcaaactcctgacttcaggcaatccaccagccttggcctcccaaagtgctgggattacatgcataccaccatacccagcctcatgctccttttttctttctgagacagagtctcgctctgttgcccaggctggaatgcagtggtgtgatctcatctcactgtaacctccacctcctgcgttcaagcgattctccttgcctcagcctcccaagtagctgggattccaggcgtgtcaccaccacctaatttttgaattttctttttttgtgtgtttgtgtgtgtttttaatgtttgtattttcaaataaagacgaggtttcaccatgttggccaggctggtctccaacctcaagtgatccgcccacctcggcctcccaaagttccagggtgacaggcgtgagctactgtgcctgaccaatacatactcttgaccaagcaattccacttcccagatttatctcactgaaacaatgagacaaaatacaatgtgcaacatacacatatacacccacacccttgatcaatatccatgagcttgtgtatggagtatctacataaataccaggatatatcaatttttttttttttttgagacggagtcttgctctgtcgcccaggctagagtgcagtggtatgatctctgctcaaagcaacctccacctcccgggttcaagccattctcctcaaatttttaaagctgcagaaaaattatagtttatcctatttctgtaagg[221 bp omitted]gaggcaggagaatggcgtgaacccgggaagcggagcttgcagtgagccgagattgcgccactgcagtccgcagtccggcctgggcgacagagcgagactccgtctcaaaaaaaaaaaaaaaaaaaaaaggctaacaatggttatctctgctagcgagatcacagaacacttttactttctgcatgatacacctcaattgtattttcattatttttacaataggcatgtgttacttttgtagttacaacacaaaccaaaaagcttactgacgctctggagttagacttggattcaaatgtcactttccacttactaatgaggggacactggagaagtaacttatactctgtaatccctagtatcccttaactggaaaatgggaataataacagccaactaccttataaagtcattttgataattaaaagagataatggttgtaaaatgcttggcagaagtctctggctctctccaaaagactgagctaactaattatccactatagtgtgggctgtgatgattttattattataatgtagtataagccagagaccttaactagtattttcagtctcttttcaaatactagcctacatgttctaagagtaaatgtggagcttccatctgcataggcagatatcctgatgaaaccatcatcagttgaaaatattgttacatggaaatgcattttaatacacctaacctaccaaacaccacagcttagcctagcctaccttaccttaaatgtgctccaaacacattagcctacagttaagcaaaatcatctaacacaaagcccattttataacaaagtgatgaatatctcctgtaatttactgactatggtactgagagtgaaaaacaaaacagttatatgggtactggaagtatagtttttactgagcgctattgctttcacaccactgtaaagctgaaaaatctttcgtctgagtctacagactcagaagaattctctggtaggcaaattaatgaccctattaagtataaatttcaagttaaatcactccacatcacagtattaagaatgctaaaaaatttacacatgtaaaaatgaatcatgcttatagtcactcattccattaggctattctaaatactgactttgtgtatacacagaaaaatgtaattttaagttgaattacttaaagccacacagcagtcttattatttatggctgcatttggtaacaacagttttgatccttagaccatctgtatcaaaatccacccattcagagactgattcactgtggggtacatcctggagttctaccagaacctaattttaaaaagatctcccagtgatttttatggatactaaattttaaataactgctataccataaggatgccttaaccagattttaaaatttgcattccagataa[139 bp omitted]catggagaaaccctgtctctactaaaaatacacaattagccaggcgtggtggtgcatgcctgtgatcccagctactagcgaggctgaggcagaagaattgcccgaacccaggaggtggaagttgtggtgacctgagatcgtgccactgcactctagcctgggcaacaagagcgagaatctgtctcaaaaaaaaaaaaaaaggaaaaagaaaataatgcgtattcacttggcacaactaggaaaaaggcaactttgaccaaaaaaaatatatatatatataaatatatatatatatacagactctcaaaagccattcagtaatggtggagagttcctctgaattaagcaagtattaatttctctccggagggcatggtgactctctattctgtattacttcatttctccaaaatccattcctcttctgttgtatgtgtaacaattagaactctgatggacaacatgcaacatgataacagcaattactgagaagaatctctaagtaccatcaaccagtagtatttaaaacccagcaagcctctcaaatctgaataacttgctgacgaagtaaagtgcctcaaacatttaaacgtttgagttcaggccgggcgcagtggctcatgtctgtaatcccaaggctgagatgggcagatcacttgaggtcaggaattcgagaccagcctggccaacatggtgaaactctgtctttacaaaaatacaaaaattagccaggtgtggtggtgagcacctgtaatcccagctactcgggagtgcgaggcag[136 bp omitted]aagctgattataagaattaactctggccgggcgcggtggctcacgcctgtaatcccaacactttgggaggccaaggcgggtggattacctgaggtcaagagttcaagaccaacctgggcaacacagtgaaaccccatctctactaaaaatacaaaattcgctggacatggtggtgggcgcctgtgatcccagctactcgggaggctgaggcaggagaatcgcttgaacccaggaggcagagttgcagtgagcccatatagcaccattgcactccagcctgggcaaaaagagcaaaactctgcctaaaaaaaaaaagtcactgagctgacccaatcttcctattataaagacatactagaagaaaacataagcaggcacagaagcataatcttaaaagaaaaagagtaaaagacaaaaataatacaagcaaaccacacttgcgacctagtggcaggactgatttcttagggatgaattcaatcttttgagcctccccgttctcagagaggggacttcagcctcccacggctctctagcaacccttctggctgactgcagggaacgcaggggacgcgcaaaagtaaaggaacgaaagcaaggaaagagagtctcttcccgaggaaaaagacggaatcttgaaatgagagaaaacgaacagcacgaaagggaagaaacctcgaaaaattacgccagagtggggactacaaggaggaaggggaagtacattagaaaaaaaggggggggtggggggaggaaggggcaaatgacttgcattacacaagcatttcgtgtccctagtggaaaggacagaagcagatagagaaggaaggaaataactggagaaagaggagtaagaaagccaaaatagactaatgctaatttctctcatgtgtctgacatttcggaaagtcaacagcatcaaaaagagacagacctcaagtgcacttcagtcccctgcaaactgcactttcacagcgtttgaagccagccttgaaaaactttctaaacaagccataactcatgtgtggcttacaatcatagagagggcgcgctgcaaatgaaaattaccagcgcccgctctcgccgcaatccttcctcggtgcagtccaacctgctactgctgaatttttcttgacaaatatttttcaaatagtttttttttttaagtgtcagaataaaggtatctcccccggctccagcagcaaacgttccaccccaaagtggattcccgcacaaaattaagcccaaagacgccaggagatggtgacgtggttgccgtgcaggtcgaaggcacatcaatcaccacagctgcagcccacaccagtcccccgccgccaggctcgggtagactgactcggtcggcgttcggcccgcctgggcttcccgggccccttccgtgcaaaccctcccgatgaaggcaggggacctcgccagagaaccccgacctcttcccccggactgcccagagccaagagccggaggaggacggtccccaggaaggaagcgccccaaaaggggaaacgtagagtccggagccccggggattgcgctccacgtcccaagcctcgccgccccgacgcgaaccccggggccggtcccggttcccccggggcccactcccgctgtagagccaagaggaaaaggcacgagagaggcgccgagcgcagcctcccgtactcaccgtggcgcagctgctccgctcagcgtccggcccgcccctccacaacgctgcgagcggccggcgaccccaaggctgctctgcgagggcagcgcttgctcccgccgccgtcaccgccacaggcacagactctgccacagccgccgccgccgctgccgccgcccggtcgccgaagcagcaatacctcctggcttccgctccccgtcggtgtcccgcgagaacttctccacgaggccccgccccgcccccgcgagacttcccccggcggaaaaggcccagagcgcaagcgctcctcctcagccgggcccctgcgggtagggaaccagctaggtgtcagggcgcatgcgccagacctccccgcagcaggtggcctccgcacggctccgcccccgggtcgccgtaaccctctcggtgccagagcgggtaaatgacagcttagccctgaaggactcttcccccgtctaatcactttattttcctcttctaccaaacctaggcagttggatgggtaggggcttgggggaggaagagatcttccagaatgaagcactccaaatagaggaccaggtcttaaaatatttgagaatccggtccgtacaaactctgctgtgttgaatgattggtgagtttgtttgctcattgattgaatcactgcagagtttgtacggaccggattctccaatataggccgaacactgtgctggggatagaacagaaatcttggcccttaaggaattcacggtctaggaagtagaagaaaaataaacaaataatgccataagtactgttataattatttggagtttgctgaggaagctaaaaaaatggagggggtactgctacactgcccattgcagaagagccttcacagatgtgatgcggcgatgtctgatctgagtcttggaggatgagtaggaatttgccaggcagagaagccagagtaagggcatttcagggaaagggaatggcacgtaagtacagaggctaagtacagaggaacggaggcgtgagagagaaagtcgtgttctgtgcagtgctaagtagttcaattcctgtatgaggccggtgagtacgggggagtggcagaagatgaggcttggagaaataattcttatttttcagttcccaaagctcttccaattaaaggatagaacacaacacacctagcgttactgtgccttctggaagccaacaaaatagcgctgaggtgagaataaccaagcatctgattctatagagaaaagaagcccattgaaacacagaaaatgaattgtgctttcaccaagtatttattgagcatcacctgtgtgcaaggggctctgcagggtcaaagaccaaccagatgaagcccctgctttcagtgctttgtaatctagagttgcctaatctgtaagacaagcagttggccccaagtgccactgaactacacatagggatggctgaggagggagccagtacttggtgctgagctaatcaagaaggatttggtttgaacggcaaagtgaaagcagggaggaaagaggaaagagtaatggaatcagccttttgttttttttttttttttttttttttgagacggagttttgctcttgttgcccaggctggagtgcaatggtgcgcgatcttggctcaccgcaagctccgcctcccgggttcaagggattctcctgcctcagcctcccgagtagctgggattacaggcatgtgccaccacacccagctaattttgtatttctagtagagatggggtttctccat[138 bp omitted]caggctggagtggagtgcagtggcatgattttggctcactgcaacttccgcctcctgggttcaagcattctctcacctcagcctctcaagtagctgagattacagcagcctgccaccacacccagctaatttttgtatttttaatagagacagggtttcgccatgttggccaggctggtctcgaactcctgacctcaggtgatccacctgcctcagcctctcaaagtgctgggattacagatgtgagccaacactcctggccatcaaccaatgtttttgattagtccaagccccagtaattggggggaagagtgatgagagagaggggccaaaatgcaaaatgcatggcttaggtgtcatagtcaagtgatgggcaacctctgaaggtttctgagcaggaggtgtctgatatgaggtgaaaataagaaaaggaccctctatttaccacttgatgcatacttaagtcatagcgcctccacagggtgggtaatatccccattttacagacttggaaactaagccttagagaggttagtaatttacccaaggaagccaaaatatagtagacctaagatttggactaaggcctgtcttgttctaaaatcctcatttttttcccgcactatgccactttgttctaaaatagcagtcagaaaaaaatagaaatggaagggagggacttagctgctaagcagagaggaagacatgagggaagaattgcagttttttgttttgagtgggcctggataacagggagaacacagaaatttgccagtcaagaggcatagctgactggagggggcaggcacagagaacagggaagggcaggtgaggagatgattgtaagggtgaagggaatttttcccttccactctgacagtttgagtctgctgaaataaactggcaatagattaacaggagaaagcacatacaaatttactgacatgcagtgtgcatggttaccatacagaatatgagactcagagaagagccaggtggctgaagcttaaagagcaccatctttgcagaggagagggagatgagcggaggtcagcaatactgaaaggtagtcaactatttttagggaaaaggaatgagcccaaacaatgcctgggacaaagttcctctgagctctgggagctggaggttgtgacaaatttcaggaaggtgaggtgcaggacttcactgtaaataaaggttgtcttattatgcagataaagtctcctaaataatctcagctgtcctcaggagaatagatgaaaagtctgtttggatgtggtgacaacttttagtcttttctcttctctggtagttaatatttcctggttatttgacgagagtcctagggaggaaattttaagacagtcgcatctattttttttcttttcttttcttttttttttttttgagatgtagtttcactcttgttgtccaggctggagtgcaatggcgtgatctcagctcaccgaaacctccacctcccaggttcaagtgatgctcctgcctcagcctccagagtagctggcattacaggcatgcaccaccacgcccggctaattttgtatgtttagcagagatggggcttttccctgttggtcaggctggtctcgaactcccgacctcaggtgatccgcccgccttggcctcccaaagtgctgggatcacaggcgtgagccaccacacctgctctttttctttctttcttttttaatggatcccttcacagatttgcatgtcttcttgctcaggggctatgctaatctctgtatcattccaattttagtatatgtgctgccaaagcaagtacacaattgaatttcttttggtttctcagtcagctaagggaactttcagacagcccctgcatgcatgtggggtggtgaaacaagactttaaaaagtccttggttctgaggcagcttgtaagtccttccaatttcctttcattcaaaagtgctcagaatgccagaggagcatactttggggtatcattctctgagccccaacatgatgatgactcatttttggaaatgcagaattcagcattccaggagacatgcaggtggaaatattcagtatgctgttgaaaagcttgacaagctggacgcagcgttctctcccataatcccagcactttgggaggctgaggcaggtggatcacttgaagtcaggagtttgagaccagcctagccaacatggtgaaacctcatctctactaaaaatgcaaaaattagccgggcgtggtggcacatgcttgtaaccccagctactcgggaggctgaggcaggagaattgcttgaacccaggaggcggaggttgcagtaagcaaagatcatgccactgcactccaacctgggtgacagaaccagactccatctcaaaaaaaaaaataaataaataaataaaagaaaagcttaatgtactcattcattctctttgccaacattaactaagcatctattctctttgtttgtttttttttgtttttgagacagggtctcactcttgtcacccaggctggagtgcagtggcgcaacctcagctcactgcagccttgacttcccaggctcaggtaattctcccatctgagtctcccaagtagccagaactacaggcacatgccgccatgcccagctaattttttgtgttatgtaagtatgtatgtatgtacgtatgtatgtatgtatgtatgtattgagacagggtctcactctgttgcccaggctggagtgcagtggcacgatcagggctcactgcagcctcaacctcctgggcaagagatcctcctgcctcagccccccagtacctgggacaacagtcatgcaccaccacgcttggctaaatttttgtgtttttagtagagatgggtatcatcatgttggttaggttggtctcaaactcctgggctcaggcaatctgcccgccttggcctcccaaagtgctaagattacaagcgtgagccaccacgcccagcctagagcatctactctctagagaggaggacaaccctccacagagtctgcagcctgaaggggaagacatgtctctgagaatttgaccaggatagtgctggtggctttggaagcatacagcaggggacctgacctcatccactatgagggaaggcagaggaagtgggctttaagctgagaccctggttagcctgagaggaagaaatgatacagcaagtgtgaaggccagacagtaagcaaggatgtaaggaagccaatagctgggacaaggaaggatgtgtggcatgtgggtaaagcagctgaagaggctcgtgaagggcctttgcttttctctctctctctctctctctttttttgagatagggtcttgctgtattgcccaggctgaagtacagtggtgtgatcacaactcactgcagcctcaacctcctgaactcaaacaatcctc[131 bp omitted]acctctgcctcccaggttgaagcaattctcctgcctcagcctccccaatagctgggactacaggcacgcaccaccacgcctgggtaattttcgtatttttagtagagatgggggtatca[132 bp omitted]gtctgactttgttgctagcctggtcttgaactcttgatcctcccacctcagcatcctaaagtgctggggttacaggcatgagccactgcacccactttttcattattgctaaagacttgagacttgactctgtggaatactgaagtaggagtgggccatggtcaaatttttatcttccaaatattttgtcactctggctgcagagtagaaaaccaattggaactaagacattcatcatctactgtctcaagtcccttacaaggctcttaaagatctggcccttccagccagtgccaccttctcagtctccagtaacacatactccaccaatactaacccacttgtggtttccggaaggtgtcatgatcctttgagtgtccatatctttacacatgcaatttcctctgttcagttggctttctacccttccactaggtccccaagtcagttttcttcttcaaaatttccatggtaggtcaggcacagtggctcacatctcactttaggaggtggaggtgggtggatcagttgagtccaggagttcaagaccaacctgggcaacatggtaaaaccccacctctactaaaaatgcaaaaattagctgggcagggtggcaaacacctctagttgggagctactcaggaggctgaggtagtaggatcatctgagcccgggagatggaggctacagtgaggcatgatcgtgtcactgcattcagcctgggcaacagagcaagaccctgtctcaaaaaaaaaaaaaaaaaaattcccaccatacctccaatctcattgcatcatgaatcattcactcattgtcccccagccctccccgctcggtggtctacaagctcccaaacagacagggtcaccttttcacatttgtattcccagtacccagcacagtgcatgcagtgaataaatggatggatggatggacggatgaataataaaggctgaccagagactgaaatgtagctgcttttctgtgctgtggtggtatttaaagctaaggaagtgggtgagatctcagaaaagagtagatgcctaagagaacaggaaaaaaaaagttaagtatttccttttaaaatacaccattgataaaaacagacattgagtatgttcatgtaaaagtatatgcatgggaaccagatttggaagggaacatttaaaagtaaaaataatatgtgttaaaatggtaggctcgtgggtgacttttttttaagtcaacatttgttatattgcctttttgataaatttttttttctcacagacacagactcagaaacttgagacaacgttgcccaagatcattccacactgagaaaaaaacacattagaggcagcagtgttttgaataggtgcatggctagtgttaaataatggaaagaaattggaacaagaggcaagttgtgaagtaaaagtcacaccctggtatgaaaacctgttgtcactgtagcgaaacttgctaattacagaccggctccatcagtagcttcacaatgcacaaaatcaccaaaaaagtctctgttttccttgggggtttttagtcgtcggaaagggcttcaggctttgttttctgtgagttacggggctgccacctgcaggtaaaatctggacattgccctgaaattgaccgaaccttggatacaaacccggcctgacagtgagcctctttcccttagcacctggctcaagaccctctcagggtcatcctgagcccatatttccaagcttctctttagggggaaagcactagatacccagtaacagccagtgacagcctaaaattgggcatttgaaattctatgctcccttgcccaattgatcttggaagttctcatctagaatttccttcacttaagttgtgatccaaggctgtgtactcctctcaggcttccagtgttccctctgatgctgagtttagcaatgagaccaagtgctgtgacccctctccaacatcctggccaccttttccttccttccttccttctttccttccttcctgccttccctccctccctctttctttccttccttccttctttcttttttctttctttcctttctttttcctttcattttctttttttctctttctttcttcattttctttctttctctctctttctctcttcctttctttaccttctttctttcctctctttctctttatctctccctctttctctctttctctctccctctttctctctttctctctctctcttttagacagagtcctgctctgttgcccaggctggagtacagtggcacaatcttgactcactataacctctgcctcctcggttcaagtgattctcctgcctcagcctcccaagtagctgggattacaggcgcccgccatcacacccagctaatctgtgtatttttagtggaggtggggcttc[153 bp omitted]ttctctctttcttttccttccttccttccttcctcccttccctccctccctccttccctcccttctttcttttccttccttccttcccttcccccttcttccttccttcttttttctttctccttccttccttcctccctccctccgtccctccctctctctctctctttctttctttctttccttctcttctttcttttctcatggtctcactctgtttcccaggcaggattgcagtggcacaatcttgcctcactgcagtctcaaccttccctgggctcaggtgatcctcccacctaagcccccgagaatagctgggactacaggtgtgtaccaccacacctggctaatttttgtattttttgtagagatggggtttcccaggttggtcttgaattcctgggctcaagcagtcttcccacctcaggctcccaaagtgctgggattacaggagccactgtgcctggcctcctggccccatttctgtcacctgacctgacccatgccaccatccttcctgggtggctgctttaacctgctaactaatcatactggtcccctccaagacattatctatattggaaccagagtggacttcctaaaacacaaatagaatgggggtacggatcacagataaggtcccaaattcctcagcatgccccatatgtccctccatggctggcccctgatgaaaactccagccttaactccttttttaaaaagttgtaaatatcttctacaaatggcctcaactcttagcctaacctccttttgaattttttgtccccactcttttgaactatttacagtttctcgaatagctccataactcttttaccttgtgcaggctactcctttgggctcaaatgcctcctttccttgccttcccaatctttagctggctcctgtctgtccttcaccacttaactcaggagccacctcctacaggaagccttcccagaagatctggttcctccagtgtattctggtaacactccatctttgctcttttcatagcagtatatgttggtattatggctgaattgtatccttttccccaaaatccatatgttgaagccccacccccagtacctaagaatgtgactgtatttgaggtta[138 bp omitted]cggtgaaaccccgtctccactaaaaatacaaaaaaatcagccaggtatggtggcaggcgcctgtagtctcagctacttgagaggctgaggcaggagaatcgtttgaccccagaggtggaggttgcagtaagctgagatcatgccactgcactccagtctgggcaacaagacagactccatctcaaaaaaaaaaaaaaaaaaaaagaaaaaaaaagaaaaggaaaagaaagaaagaaaagaaaaagaaaggctgttaggctgaatcctaacccaatctg[132 bp omitted]aaatcccatctctactaaaaaaaaatacaaaaaattatctgggcacggtggcgggcgcctgtagttccagctactcaggaggctgaggcaggagaatcacttgaacccgggaggcagaggttgcagtgagtcaagatcgtgccactgcactccagcttgggcaacagagcaagactgtcttgaaaaaaaaaaaaaagaggaagaaggagaagaaggagaagaagaagaaaccaaacctgcgaacatcttcatcttggacttgattttaaagattttaaaacgctcaaaattgtgaattttgttatggcagccctaggaaactaccatctactcacttgcccctctcccctttagactatgagctcctcaagcacagggaccatgtcttgtttttcttggctcgccacatctagcctaacgcctggcaagagcacactccaataaaaaccaaatgactggatggcttaggcatggcaggaggacagaaggaaccatgaagaaaagtaaacgggccaggtgtggcgattacgcctttaagcccagcactttgggaggctggggtgagtggatcacttgagccttggagttttgagaccagcctgggcaatacagcaagacctcgtctctacaaaaaatacaaaaatgagccaggtgtggtgttgcgtgtctgtagtaccagctactcggggggttgaggtgggagaattgcctgagtctgggaggttggggataagtgagccatgatcgcaccactacactatagcctgggtaacaaagtgagactctggctgaaagaaagaaggggccgggcacggtggctcacgcctataatcccagcactttaggagaccgaggcaggtggatcacctgagatcaggagttggagaccagcctgaccgacatgatgaaaccccatccctactaaaaatacaaaaattatccaggggtggtggcacatggctgtaatcccagctactggggaggctgaggcaggagaatttcttgaaccccggaggcagaggtttcagtgagccgagatcgcaccactgcactccagcatgggcaaaaagagcgagactccatctcaaaaaaaaaaaaaaaaaaaggaaggaaggaagaaagcaggaagggaaggaaggaaagaaagaaagaaa[138 bp omitted]tgataaaaccctgtctctactaaaattacaaaaaaaattagccaggcatagtggtacatgcctataatcccagctactcaggaggctgaggcaggagaatcacttgaacccagcaggcggaggttgcagcagtgagccaagatcgcgccactgcactccagcctgggcggtagagggagactctacctcaaaataaataaattaattaaataaaataaagaaaaaaagaggccaggcatggtggctctcacctgtaattccagcagtttgggaggcccaggtgggcggattgcctgaggttgggagttcaagatcagcctggccagcgtggtgaaaccctgtctctactacaaataaaataattagcccagcgtggtggcaggtgcctgtaatcccagctactcaggaagctgaggcaggagaattgcttgaacccgggagtcagaggttgcagtgagctgagatcgtgccattacactccatcctgggcaacagaaggagactctgtctcaaaatagaaaaaaaaaaaacttcagataagcaaatggactctggtcctgacagctccctgtagcgatgccagggtcagttcagaggagcctggcctttctcctttccttgtgtttcagtttccacatctctttttccttagcacacactctgcccgttaaggagatgaagtcagttccattttggccatgagctaaaatgcaagtgatgcatccaaagggtggaaatttcctctgtgttcctacgcctacaagaaagaagcattagcaactttagcaacttaatactaggaagtctctccaacgttggtttttataaaattaaaaatatttcaggccagaagcggtggctcacgcctgtaatcccagcaatttgggaggctgaagtgggaggattgcttgaggccaagagttccagaccaacctaggcaacctagcaaggcccttgtctctacaaaaattcaaaaaaattagccgggtatggtggcatgcacctgtggtcccagctactcaggagactgaggtgggagtattgcttaagcctgggaggttaaggctgcagtgaactgtgatcatggcactgcctgggtgacagatcaagaccctgtctcaaaaataaataaataaataaataaataaaaatttcagtagccatgcatggtggcacatgcctgtagtcccagctactcaggaggctgaagtgggaggatcacttgagtccaggagttcaaggctgcagtgtgctatgatcatgcctgtgaacaaccattgcactccagcctgggtaacataacaagactccatctctacaccaagtttaaaaactaatgcaaaataaaaatatttcactgacaaagtttgtatatattcaaggtgtacattgtgatgatctatgtataagtcgtgtaatgattatcacaaattaacacattcaccaccacctacgctgtacattagatccccagaacttgtttattttaaaatagcaaaatattatccctatgagattctcccttttcttctccttaacatctcccgctaaaaaaaaaaattcaggccaggcgtggtggctcacacctgtaatcccagcactttgggaggtggaggcaggcagaccacctgaggtcaggagtttgagaccaggctgaccaacatagagaaactctgtctctactaaaaatacaaaattagccgggcatggtggcgcatgcctgtaatcccagctacttgggaggctgaggcaggagaatcagttgaacctgggaggcggaggttgcagtgagctgagatcatgccattgcactccagcctgggtgacagagcaagactccatctccgaaaaaaaaacgaaagcatgggagaaagaggaacaatgagcagcgaggataagctattctttttcagagttttgctataaaacagagcagagcaaagagtgggagttggagggctaaggaagggattttaaatatggggccaactacagcatgttttgtgtgccgaagggaatatctagaagaggagaaactcagctatgagagagaggagagaattgaggaacaaaatgtttgcacttcctacatttccatggacaagaagtagcatctcaggccaggcactggggctcatgcctgtaatctcagcactttgggagtctgaggcggaaggatggcttgagcccaggagttcaagaccagcctgggcaacattgtgagaccccatctctataaaatgtaaaaaaaaaattagccagccatggtggcatgcacctgtggtcccagttacttgggaggctgaggtgggaggattgcttgagcccaggagtttgaggctgcagtgagctgacatcatgccactatactccagcttgggcaacagaatgagaccctgtctcaaaaaagaaaaaaaaaaaggaagcatttctgagaacagagctaggttggtgggtagcagtggtggcaggaagatgtaatctttctagatatttctgttctgacggcttccattctctcagctgaattaatgagaacacctgtggtggggatggcaaagcctggaggaggtgtgaaaagaccaggaggcttgaaactatccttttggacagtgggggagcaatagattcaggagacattgcaggcagtgctaaggtccaactcagacttatggttgtaaatttctttttttttttccgagacggaggcttgctctgttgcccaggctggagtgcagtggcacaatcttggctcactgcaagctccgcctcctgggttcatgccattctcctgcctc[196 bp omitted]ttcaaaaggctgctcagcctagttgagtgtggtttttttatttttttaagacggagtcttgctctgtcgcccagactggagtgcagtggtgcaatctcggttcattgcaagctctgcctcccatgtttacgccattctcctgcctcagcctcccaacatgctgggattacacgcatgagccactgcgcccggccagttgagtgtgtttttaacctagttggttttttttttttttttctgttttattttacctgatgtctacaacaacaactagttgtgtatgtgttttttttttgtagtttttttgttttgttttgttttgattttttgagacgaggtcttgctctgttgcccaggctggagtgcaggggcatgatctcagctcactgcaacctctgcctcctgggttcaagcaattctcctgcctcagcctcctgagtagatgcgattacagacgcctgccaccacgccaggctaatttttgtatttctagtagagacagggtttcgccatgttggccaggctggtctcgaattcctgacctcaggtcaccctcccacctcgggctcccaaagtgttgggattacaggcatgagccactgtgcctgacctagttgtattctccttttttattttattttatttatttttatttttttggtaggagggagatgcagtctcaccctgttgccaggctggagtgcagtagcactatctcagttcactgcaacctctgcctcccgggttcaagcaattctcctgccttagcctcccgagtagctgggactacaggcacatgccaccacgcccggctaaatttttttttgtattttagtagggacagggttttaccacgttgcccaggctggtctcgaactcctgagctcaggcaatcccccccgccttggcctcccaaagtgctgagattacaagcatgagccaccacgcccggcctttgttcttaaccagtcaaattcagtggcctggttgcagacacggagcaggcatagattctggtttaaccaggttagggttttgccaacttgatatcacccgaggagagagggctcagagtgttgaggatgtgtgtgcaaggcagcaggtacagcgctggagcatgaaacccaagcccaatgaaaaacagaaagggaggatttgggcacgtttaatggctatggagtttcaatgtgagatgatgaaaaagttctggagatggacaatggtgatggttgcataatgatgtgaagttaactgacattaaattaatgtcagttaattgtatacttaaaaaggttaaaatggcaaattttatgtacattataccataataagtttttcaaatattaaaattggttaggcacagtgattcgtgcctgtaatctcagcactttgggaggccaaggtgggcagatcacttcagcccaggagtttgagaccagcctggccaatgtagtgaaaccccatctctactaaaaatacaaaaaatatccaggcatggtggcgcatgcctgtaatcccagctactcaggaggctgaggcaggagaatctcctgaacccaggaggcagcgtttgcagtgagtggagatcgtgtcactgcactcggcctgggtgacacagcaag[142 bp omitted]tactaaaaatacaaaaaattagccgggcatggtggcgggcacctgtagtcccaactgctaggggtgctaaggcaggagaatggcgtgaacctgggaggcggagcttgcagtgagatgagattgcgccactgcactccagcctgggtgacagagcaagactctgtctcaaaaaaaaaaaaaatcccaaaaatattaaaattaaaaaaaatttgtttttgatggccaggtgcagtggctaacgcctgtaatctcagcactttgggaggccaaagcaggtggatcacctgaggttaagagttcaagaccagcttggccaacatgatgaaaccctgtctctactaaaaatacaaaaaattagctgggcatggtggcgggtgacataatcccagctacttgggaggctgaggcaggagaatcgcttgaatgaaggaggtggaggttgcagtgagccgagattgcatcactgcactccagcctgggcaacaagagcaaaactctgtctcaaaaacaaaaccaaaaaaaaccccaagaattgtttttgagacagggcctcattctattgcatgtgctggagtttagtgctacaatcatggctcactgcagcctggaactcctgggctcaggcgatcctcccattttaggcttctaagtagctgggactacagggtcacgccatcgtggtttgctcatcattttgtattttttgtagaaatgaggttttgccatattgcccaggctggtcttgaactcctgagctcaagccatacacccgccttggcctcccaaagtgctgggattccaggtgtgaggcaccacgaccagccaatattaaaatttaaaaaaatattgatatctggccccatctcagataaatcagaatctctggggttggagcctaaacatcagtattttattttttatttttggagacaatgtctcactctgtagcccaagctggagtgcagtggtgtaatcatagctcactgaagcctcgaactcctgggctcaaatgatcctcccaccttaacctcccgagtagctaggactacaagaatgcaccatcacacccaactaattcattttttttttatttttagaaacagggtcttactatgtcgctcaggctggtcttgcaatcctcccatctcagcttcctgtgtagctggaattacaggcatgagctaccacaccctcaacatcagtattttaatagactatggaattgctgaattagtacattttctttcactcattcattcaacaaacacatactgaatgtgcattatgagccaggcacaccaccaggcactagggatgcatgagtgaa[131 bp omitted]tctctactaaaattacaaaaattagccaagtatggtggtgcgtacctgtagttgcagctactcaggaggccaaggtaggaggactgcctgagccctggaagtcaaggctgcagtgagccaaaattgtaccactgcactccagcctgggcaacagagtaagaccctgtctaataaataaataaataaaaggacagggttcctgccctcttggagcttacaatcacatgaggaaaggtgagcaacaagcaacaagccagtaaacaaatatgatttaattacgatttttttttgagatggagtcttgctgtgtggcccaggctgcagtgcaatggcacaatctcagctcactgcaacctccgcctcctgggttcaagtgattctcctgcctcagcctcctgagtagctgggactacaggcacccgtcaccatacccagctaatttttgtatttttagtacagacgggggtctcaccagcttggccaggctggtctcgaactcctgacttcaggtgatccacccaccacggcctcccaaagtgctgggattacaagggtgagccaccgcgcttggcctaattacaaatttagaagcctgtttcaactatctaagtggacttgaaccaagaagggggattagagatccaccttgatctccgttggaggcattggagatgccgtgggatgggtggacttgagatattactgtagggagaaaacacaggtggcagggttggaaatgagaggtgagtgagagtgagaagcaggacgacatccaggtttacagcttgagcactagaggaccaacccgagagacacagtgaaataagaacaggatttaatgtaggagagacggttccagtgccaaccagccggttcccagtgctgagtgaggaatctgtgacatgtcttgtcacttgtttgtgacttaatttcttcatctggaaaagtgttgataataatatatctcaaaacaggccgggcacggtgtctcatgcttgtaatcccagcactttgggaggctgaggagggtggatcacttgaggtcaggagtttgacaccagcctggccaacatggtgccaacatggtgcaaccccgtctctactacaaatacaaaaaaattagccaggcgtggtggtcggcgcctgtaatttcagctacttgggaggttgaggcaggagaatcccttgaacctaggaggcggaggttgcagtgggctgagatcatgccaatgcactccagcctaggcaacagagtgagacttcatctcaaaatagtaataataataatatatctcaaaacagagttgacatgaaaatgaaacaaaataagacaatgcgtattggctgggtgtggtggctcacacctgtaatcccagcactttgggaggtcaaagcaggaggatctcttgagcccagaaatttgacaccagtctgggcaacacaatgagatcccgtttctcttaaaaaaaaaaaaaaaagattatttctttttcttttccttttttttttttttttggagacggagtctcgccctgtctcccaggctggagtgcaatggtgcaatcttggctcactgcgagctccgcctcccaggttcacgccattctcctgcctc[176 bp omitted]cccggccaagtgttgtaaaatgtttcttaattgactgggcgtggtggctcacacctgtaatcccagcactttgggaggctgaaacctgcagatcatctgagtttgggagttcaagaccagcttgaccaatatggagaaaccccgtctcaactaaaaatacaaaattagccaggcatggtggcacacgcctgtaatcccagctacttgggaggctgaggcaggagagtcagttgaagccgggaggtggaggttgcggtgagctgagattgcaccattgcaccccagcctgggcaacaagagcgaaactccatctcaaaaaaaaaatttttttttcttaatttttaccttttagacattctcctctcaattttccctttcttcgtcttaacaattccacttggatccaccgttgtcatagttattaaaagcttctcagactgtatcttttagctgttctctcctgagcatacctgtattgccagtcacccaatgatctcaaaacgctttgtagattacgaccattatttattttattcttcttattttttttttgagacagggtctccctctgtcacctgccttaccctccttagtagctgggactacaggtgggcaccaccacaccacaccctgctaatttttgtatttttagtagagactgggtttctccatgttgcccagactggtcttgaactcctgggctcaagggatctgcccaccttggcttcccaaagtgttgagattacaggtgtgagccactgtgcccagtgccttaaagctttatagaaaaaataatggcaggccgggcacagtggctcacacctgtaatcccagcactttgggaggccaaggcaggcaggtcacctgaggtcaggagttcgagaccagcctcgccaatgtggagaaaccccgtctctactaaaaatacaaaattagccgggtgtggtggcacatgcctgtaatcccagctactcgggaggctgaagcaggagaatcacttgaacccgggatgcggaggttgcggtaagccgagatggcgccactgcactccagcctgggcaacaagaatgaaactctgtctcacaaaaaaagaaaagaaaagaaaagaaaaaataatggtccggagcggtggctcacacctgtaatcctagcactttgggaggccgaagtgggcagatcacaagatcaggagttcgagatcagcctgatcaacatggtaaaaccccgtctctactaaaaatacaaaaattagctggatatggtggcaggcccctgtaatccctgctactcgggaggctgaggcaggagaatcacttgaacctgggaggaggagctgcagtgagccgagatcgcaccactgcactccagcctgggcaacgcagtgagactccgtcttaaaaaaaaagaaagaaagaaagaaaaaaaatgtcttagggcccctttacagagaaaacatgccactccagcctgtagctaagcaggtgtacccctggtggacaagtgacttacccaggacgatcactgccgaggccaggatttgggaacattcaaatgtaactcggtggtttcacattttacatgaaagcatacttcacggttttaattagcaagtggaataacttctacttgctcatgttgtcagccctacgtgttgccatcaaccacagggtaattagtgagggaaaggatcaagcggcttctgttgtgacaaagagtgcagcatttgtaggtgatccttacctaggctggaaaatcgggtacttcccttggttgccattagatgtcactcgagacaggcaggcatttcctcagaggtggttgtagaactaactaactgtaaaggaatgcagtcctttggctccaaaaatggattcgaccttgctgcccggactcgccgcactagaagtgccaggaaacgttgtttgatggagcgtggaggaaatatcctgttgcaccatatgtaatggaaaccctatttccctggaaccaaaacagaattcacgacccaacaagactgctctctccctcccccgccaacccctaaatctttgttaaccacaagtttcttttctttcttttttttttgagaccgagtctcgctctgtcacccaggctggagtgcagtggcgcgatcttggctcaccgtaagctccgcctcctgggttcaagccattctcctgcctc[135 bp omitted]ggcctcccaaagtgctgggattacatgcgtgagccactgcgcccggccaaccacaagtttcaattctttgtggttacaaaagaacagaaataatgttttcccatttacttaataaactcagaagctgcattttctctgccttctatgaaacatatcttccctttctactagactcttttttggttttatggctcaagggcagaaagttgtggaatttattctcttttcacttctaaaacattttcagacttagattgctcagtggcaaagtctgatgtcttcctctctggttaggatcctgaatgtatggacattttgtcttaggagcaaaaatgaaataatgcacacagtgtgtttagctcagagtctaaccctcagcaagctcttaaatgtaagctacagctgggcacagtggctcatgcctgtaatcccagcactttgggaggaggccgaggtgggcggatcacttgagggcaggagttcgagaccagcctggccaacatgatgaaaccctgtctctactaaaaatacaaaaattagccatgcgtggtggcaggcacctgtaatcccagctacttgggaggctgaggcaggagaattgcttgaacccggaaggtggagattgcagtgagccgagattgcaccgttgcactacagcctgggcaacagagcgagactcagtctcaaatgaaaaaaaagtaagctactactactactgctattattattgtatgtctggatcatgacagtaagataattgccagttagaacctagaggaacaagattggttgcaaggatgcaagcctgccccaagcccccacccccaaggcatctgggcaccctgaaccaggctgtcaccgggaacaaccccctctccgagcaatctgaccacaggagaaggtgaagtaacgtggcataatgaaaaccaatagttttggtggtaacagacactgtttactggctgtgttttatatgacaatacagctaagggtttttttttttttttttttttttgagatggagtctcgctgtgtcgcccaggctggagtgcaatggcgcaatctcagctcactgcaagctccgcctcccaggttcacgccattctcctgcctc[206 bp omitted]tgtccactctattaagcctgtctttaacccttcttattacaagcaattaaattaggaggagaactaactcgtacagaatactgactatgttttcgggccctgtgctggacacttggcataatttctcaactaacttctgcaaacctcagagtcctcatctataataatgtaaggtgtgtgagaaataattgataatgtccattttcctgctttctagaggcttgtttcatttgcaaacaggataggagtgcttgcatatcaattctaatgcttctgcttttccaatcctttctcttttttggcctagctgagtgttttatgagacttcactcagtcacaaagcccccggaagtttaccaatactgcctctgttctgagctccaaagaaatcaagcaacttgcttccaagttctgctggcagcttctctggggctaacaatcaacccgttcctgaatctttggccctgctcaagaaatcaaatctccatcctctcccaaattaacatgagcatttggtctttaggaaaattaaatctctataagtatcctgagctaagatcaatataaataccagaactgcctagcaaccagaacggattactcattctctctgatatttagctgtgtcagatggggaaaaccttttgctttatatagctgcgcttacgtacacccaggctgaagatgaatcagggaagccgctccaaatgcaagggaagtgaaaatagagtgaaagacaggagggatccttcctgatattctgtgcagagaaaattcttcaccagattccgtcctggtttggaggccatgaaaggaggggcctgaaccacaggcctccgtgtaactgaggagttagaaattgaacacaaatagaggccgggcacagtggctcacgcctgtaatcccagcacttttggaggctgaggtgggcggatcacttgaggccaggagtttgagatcagcctggccaacatggcgaaaccctgtatctactaaaaatacgaaaattagccaggtgtggtggtgcgcgtgtgtaatcccagctacttgggaggctgaggcatgagaattgcttggacccgggaggcggagtttgcagtgagctgagaccatgccactgcactccagcctgggtgacacagtgagactccgtctcaaaaaaaaaaaaaaaaaaaaaaagaaagaaagaaagaaattaaacacaaatagaagatgaaagaatttgaacgtgctttcatttagttttaaagggacaaaggcttagtgaacatcttaaagtacaaactgtgatgaaagacaaccactgttgctttccctatttattggaaaccagacaaattctagcttagcaaattcaggttagatcaagtgggacctttttgacgtgagttaaatactggaatgtgttactgaggctgcagaatatctttcagttgcggtgattaggtacctgtttttttggcataaggtcggaggcaaggcagtgaactctctaagctctctaaatatatttaatatattatatctaagctctgtaaatctataataatacatagtggccagatgtggtggctcatgcctgtaatcccagcactttgggaggctgaggtaggaggatcgcttgagcccaggagtttgagaccagcctgggcaacatggcgaaaccctgtctctacaaaaagtagaaaaattagccaggcatggtggtgcctgtggtcctagctacttgggaggctaaagtaggaggatcatttgagcccgggaggcggaggtttcagcgagccgagatcatgtcactggactccagcctgggtgacaaagtgagaccctgtctcgaaaaataaataaataaataaacatagttaccctattaacagtgtggcacaaatagccctgtttatccaataaacaggtgtgcctaggacttcaacaagtttaaatttgtcaagtcgatcatagataaatataagatctgtacattttacagaacagaagctggactccagcagccagggggagaatgcaggaaggaatccttgctcttttcacatagcctctgatcattgtctcttccacactgtccttgggactctctagcagctgaaggcaaagctatgtgaccccaagtatgtctgtccaggagggaagaaaagcatctaaaccctaggggaatgtcggcaatgtgggcttggcaaatggggaatgccgggaatgagaccacagtccacggttcagatagcccagtgtggctcgccccgccctgatatccttcatgaaaatgaagcgaggcggctcctggagaggggctctctgctttggaagctgtaaattctgcttctgaatcatattgcttttctgagcccatgtgtcttaatatagctagaaagatttcatccagtctggctcaggctgcagagaactaaatatgttgtcaaaatactccctaaactcagggtccaacaagaccacacaggcagctgtctttattatcacactgttctgcctaatacttagcaaaatatttgtgagaatgctcccatcgcggtgctcttcaacatgaatttcccttggaggtagttttttaagttaaagagaatttctgggaggatactcatatattagttgcctcagagtaggaaacctaagaggtaggggacaggggtgggagagtgacatatttttcactgtatacctctttatgtcttttttttttttttttttgagatggagtcttgctttgtcatccaggctggagtgcagtggcgctatctcagctcactgcaacctctgcctcccgcattctcctgcctcagcctccctagtagctgggattacaggcggccaccaccatgcctcgctaatttttgtatttttgtagagacggggtttcaccat[139 bp omitted]aacaacctcatctaccttttgctgaccacttcctccacatcttctgttcattatctcatttaacaagccaacgagaaagttccattattattcaaattctacagacaaggaaactgaggcttagaaagaagtccctttgtcagttaagtatcagatctagaattcaaacttgggtctgtctgactagccacagcttgtaacccccacacctactgcctcagtagctgtaagaac[224 bp omitted]gagg[139 bp omitted]atttcctggctggtcccagtgcagtggtgtttacagctagttgatcacaatcagagatttttatgttccttctccaatcccactgcttcactt[131 bp omitted]aaccccacctctactaaaagtacaaaaattagccgggcattgtggcatgtgcctgtaatcccagctactcaggaggctgtggcaggaaaagcttgaacccaggaggccaaggttgcagtgagccgagatcgcaccactgcactccagcctgggcaacaagagcaagactccgtctcaacaatacgataccatacgatatgatacaatacaactctaaaacacactaaagtggccgggcgcagtggctcacgcctataatcccagcactttgggaggccgaggcaggcggatcaagaggtcaggagatcgag[133 bp omitted]gagcttgcggtgagctgagatagcgccaccgcactccagcctgggcaacagagcgagactccatctcaaataaataaataaatataaataaataaaaaataaaagacactaaagaagcacatttaatgcatgctctttgacagcaaagctgggttttcagtacatgtcttttcatgttggagacaaactatttctgcaggattactggccagccagtttaccaaagtatgaggtctctggtcccctacaaccaaatcctgagcaaggtccctcttagtgggacacatcgtaaacagcattcaaacggaaagggaaaccttggctaggggcagtggcttattatgccactttgggaggccaaggcaggcggatcacctgaggtcaggagttcaagaccagcctgaccaacatggtgaaaccccatttctactaaaaatacaaaactagccaggcatggtggagggtgcctgtaatcccagctacttgggaggctgaggcaggagaattgcctgaacctgggaggcggaggttgcaataagctgagattgcaccactgcactccagcctggacaacaagagcgaaactccatctaaaaaaaaaaaaaaaagagctgtgagaatcttagaagccccatgaaaggacaaacccctgcattactagtagtttctatggacacaagaagaaaggacaggattgcaatgaaaactaaccaagcagcccgcaattcaagaggaggctgcagaaggccaggtggaataacagctgataatatatcacacacttgcacaaagcttctgtcatccaaagatagaacaggggttttacaaacagccatcaattactccaactttttgtggtgaaaatcaaggcagggatctggaaatcatgtttaaataaagctgccttccttacggagctcattcctgctgttagaggaggctttataagcgtattcttgatagtctttgcagttcaaaagtatctccacgtgcatgatttcatctgagtgagcaagcgtcctgtcttcctctagtgctggtatccaataccctctctctctacatgccccaacaaataaccaagtgaggtgggctgccttggaatagcagcccctggaaggcagcagcaagcagggttccaagtctgcaggctctgaccagggtagaacatctggggagatagacttgatttcaaacaatgagggtcatggtgattcagtgttggcactagaacaaaatgtaggagagatttctcccaccttcaaagtttgcatccatgatgcccttttttttttttttttgatatggagtttcactctgctgtctgggctacagtgtagtggcgcaatcttagctcactgcaacctccgcctccggggttcaagcgattctcgtgcctcagcctccagaatagctgggattacaggcatgtgtcgccacgcacagctaatttttgtatttttagtagagacagggtttcaccatgttggccaggatggtctcaatctgttgacctcgtgatccacccacctcagcttcccaaagttctgggattacaggcataagccaccgcacctggccttatttttaaaataaatagagacgtccaactcctgggctccagcgatcctcctgcctcagcctctcaaaatgctggaattataggcatgagccactgcacccggccaaatgtttattttttaggaatataatttttttcctaggttcagctggtattacaatgctaagaaggaagaaaagcctgttgtgtatgtttttatattttaaaaatttgggttttttttcgaactagataaatttggtctttatcatctgttggatgctcatgcttgtgcctggctcatttcaagagcatgatgaatgaaaattttaaagagcagggcgggagaaatctctctgacattttgtttcagcgccgacactgagtcaccattaccctcatttgtggaccacagattttaaaacatctttgaccaagttgttcctctgcaaccttgaatagcctggttgtatttatttatttgagatggagtcttgctctgtcacccaggctggagtgcagtggcgcaatctcagctcactgcaacctccgcctcccaggttcaagcaattctctgcctcagcctccagagtagctgggattacaggtgcccaccaccatgcccggctaatttatgtatttttagtagagatgggatttcaccgtcttccaggctggtcttgaactcctgacctcatgatccacccgcctcagcctcccaaagtgctgggattataggcgtgagctaccacgcctggctaactaggttgcttattaaggacaaagaaaacaaggttgcatactgtaccttcaagttaagctcgaattttcccttttggtctggaagctggaatggcatgttcacattggctggggtcaccaggggtgtgtgaagcaagcatctgctccctaaataatgtgccctatcctcttgcaaactcagacagcaatggaaatcagcctaatgtctcccactgtggaaagggtgtgatgaatgacaagcttagggtttattttcagtgtccactcacagtccatttattgtgtgatactgaataaaactacttatcctggttgtcccacatttctgccttccagaacatggatacggtgttgatacatctgcagggatgtcttaataggaagagaggtcagtggtagaaagccctgtgagtactcaaaaaaaatgtgtgggaattcaagggtttagtactagaaaggcaaatagatctgaacttcagtctaataaagacatccaaggagttctattttttcttttttttgtttttgtttttgttttttctttgaaacggactctcattctgttgcccaggctggagtgtagtggcgtgatctcggctcactgcaacctccacctcccaggttcaagcagttctcctgcctcagcctcccaagtagctgggatcacaggtgcctgccaccaagcctggctaatttttgtatttttagtagagatgggggggagtttcaccatgttggtcagtctggtcttgaactcctgaccttgtgatctgcccacctaagcctcccaaagtgctggggttacaggcgtgagccactgagcccagctttatttacttttttttttttgagactgagtctcacactgtcgcccaggctggagtacagtggtgcgatctcagctccctgcaacctccacttcccaggttcaagcgattctcctgcctcagccttctgagtagccaggattacaggcgtgtgccaccacgcccggataatgtttgtattttttttagtagagatgggttttcaccatgttggccaggctggtctcgaactcctgacctcagatgatccgcccaccttggccacccaaagtcttgggattacaggcatgagccgctgtgcccagcctgtaagccaccacgcctggccccaaggagttataaagttcattcgtttctaaaccacacgctaaccacaccccatgataaaatcaaaacaaaaccaaggcaacaacttgtgtccctcagccttctcttcctagacaaactgctcagccacagggtatctcttcctgagcacaagaggactgctttcccagagagagagcatctccatttattagctgacatcgcttacagtcattgctgtgccaactcacccctgaccccatcccctcacctggagaaagtggcaaaaaggaatagtgacaacttggacatctgacaccaccaacctggcaagggactgtcaaacgctaagcagaggccaggtgtggtggctcacatctgtaatcccaacactttgtgaggctaaggtgggcggatcacctgagatcaggaattggagaccaacctggccaaaatggcgaaatcccatctctactgaaaatacaaaaattagccaggcacggtgatgggcacctgtagtcccagctactggggaggctgaggaaaggatcctgggcaaaaagttgcacgtgagctgatacaaacacatcactccccttacacaaggaggaataaccatatggggaaatgaccttccataaggaagtgcaacaggcaacagttattcctctgggggcatcttccttctcggggcaactcatcacctctcagatttgagtatactcagaagtgatcaggccattgggtcaggcaggtgctaactgtgctaaccaggaatcttaagactgatgcatgaggctgggcacgagggctcatgcctgtaatcccagcacttcgggaggctgagggcatatggcttgaggccaggagtttgagaccagcctgggcaatgtggcgaaaccccacctcttacaaaaactaaaaaaagagttagtcaagtgtggtggcttgcacctgtaatcccagctacttgggaggctgaggtaggaggatcacttgagcctggaaagttgagtctgcagtgagccataattgtgccactgcactccagcctgggcaacagagcaagaccttgtctcaaaataaataaataataaaagaataaaaaaaattagctaggtgtagtggcacctgcctgtagtcccagttactggggaggctgaggtgggaggattgcttgagcccaggagctggaggctgccgtggagctgcaattgtgtcactacactccagcctgagtgacagagccaaaaccctgtctcaaaaacgaaacaaaatacaacaaaaatatgtcaggcatggtagttcatgcctctaatcccagcactttgggaggccgaggagggcagatcacttgaggtcaggagttcaagccagcctggtcaacatggtgaaacccccatctctactaaaaatacaaaaattagctggacgtggtggtgcacacttgtaatcccagctacttgggaagctgaggcgggaggatcatttgaaccaggaggtggagattgcagtgagccgagattgtgctcctgcattccagtctgggtgacacagcgagagtccgtctctaaataaataaataaagaccaatgtatgaacacattggagccacaattgtgccactgcattctggcctgagccacagagcaaaactctgtctctaaaaaaattaaaaaggccgggtgcggaggctcactcctgtaatcccaccactttgggaggccaaggcaggcaaatcacctgaggtcaggaattcaagaccagcctggccaacatggtgaaaccctgtctccactaaaaatacaaaaattagctgggagtggtggcgggcgcctgtaatcccagctactagggaggctgaggtgggcaaatcgcctggggtcaggagttcgagaccagcctggccaacatggcgaaaccccgtctctactaaaaatacaaaaattagccgggcgttgtggcatttgcctgtaatcccagctgctcgggaggctgagacaggagaattgcttgaacctgggaggcggaggttgcagtgggcagagattgtgccattgcactccagcctgggcaacagaacgagactgcctctcaataaataaaataaataaataaatactgatgtatgaaccgaatagatgacgaattccctcactacaggaggaggtatagcgaagcagttaagaacctacctctttacccacatgacccagcagtgccactcctaggcatctacccaggaaaatggaaaatacacgtccacacaaaaactcttacatgaatgttcatagcaacattactcataatagccaaaaaaaaaaaaaaaaaaaaaggaaacaatctaaatgttcatcaactaactgatgaacaggaaaacaagtgtgatatatccatatactagaatagtattcagccctaaagaggaatggaatgctgatacatgttatgacatggatgaaccttgaaagcatcatgctaagtgacagaagccaggtgcaaaagtccacatagtatatgattc[137 bp omitted]caaaaccctgtctctactaaatacaaaaaattagccaggcatggtggcggatgcctgtaatctcagctacttgggaggctgaggcaggaggattgcttgaacctgggaggcagaggttgcagtgagccgagattgcgccattgcactccagcatgggcaagaagaacgaaactccgtctcaaaaaaaaaaataaataaataaatagaaacatccacaaagacagaaagtagactagtgatggcctgggctgggggaggcagtgacggggaaatagaaatgactgctcaggggtgcagggtttcttttttgaggtgacacaaacattctaaaattggttgtggtgatggttacccaattttgtgaatattctaagtgtcattgactggtatactttattttattttatttgagacggggtgcagtggcacaaccttggctcactgccacctgtgcctcccaggctcaagcgatcctcccacctcagcctcccaatagccgggacttcaggcgtgtaccacaatgcctggctagttttttggtatttttggtagagatggggttttgccatgttgctcaggctggtcttgaacccctgagttcatgcgatccacccaccttggcctactaaagtgctaggattacagatgtgagccactgcacctggccagactggcacactttaaatgggtgagttgtatggtatgtggattgtatttcaacaaagctgtttaacccttttcctgtttgcccagagaatacttgttgatgcttgcggctgtagtgtttaccctgagataatgttgcaatgaaatatctcatttttattattattttcatatcactctagtatattgacattagaaacaaaagacatcattctatttacagcattctagttttagtagtggtatttccatctacaaaatatagtaatccttggccgggcgcggtggctcatgcctgtaatcccagcactttgggaggctgaggtgggcggatcacctgaggtcgggagttcgagaccagcctgaccaacatggaaaaaacccatctctactaaaaatacaaaattagcctggcgtggtggcacatgcctgtaatcccagctacttgggaggctgaggcaggagaatcgcttgaacctgggaggcggaggttgcggtaagctgagattgcaccattgcactccagcccgggcaacaagagcgaaactccatctcaaaaaaaaaaaaagtaatcctcgatcgctgaaaatgtcaaatcctagaaaacatagcattcctacaagtgatgttaacatgttctcaaacagttgttggccaaagattcatttgatgaatttgatttttctgaaatagatgatttggatgattcagacagttctgatattagttctgtttagaaataaatccaagaacagtttttatattttattttcacattgaaaatcaatcagatggctgggcacggtggctcacgcttgtaatcccagcactttgggaggccgaggcaggcagatcacaagttcaggagttcaagaacagcctggccaacgtagtgaaactccctctctactaaaaatacaaaaatcagctgggcatggtggcgggtgcctgtaatcccagctactcgggaggctgaggcaggaaaatcgcttgaacctggcaggcggaggttgcagtgagccgagattgcgccactgcactccagcctgggtgacagagctagactccatctcaaaaaaaaaaaaaaaaaaatcaatcagatttccttcagcctcaaagagcatgtttatgtagaattaaatcagggctggcagcgagctgcacttttttctactaaacaggaaaagggttaaaaaaaaagactctggcctcagttttttcatctctgaaatggagatgatagttattatataaagcacttagaacagtgtgtagtacatagtaagccctacataatggttaactattactgatattattatcattactgatatgtgtctcctaggacaccccttagctggttttaaggccctcaaaaagctgagtcaaaagaatgcttagaaagcacaaagtcagaagtacgtggacgtccttgtgggatactgcatcagaccttggaaagcccttcattctctcatctgtcagttatatgaatatgtgccaggcactgctcttagtgctgggaaaacaacaatgaccaaaatagacacaatttcctgctcgtatgaagcttttatcttagtagaggaagactgaaaatgaacaaataaacaaacaaaaaaatggagcaggcggagatcaatattccgaaaaaacaaaaagcaggatggaaaccggggagcacgttaggttgagagtcgagggagtcccctcagagaaggggacattctgatcctgaaaatgtcctggagaagggcattctggctgtgggaatagctgctgcaaaggtcctgaagaaggaatgcaccaggtatgtggcaggaaaagagagaaggccagtgtggctggaatgtgttgagcttggaggcaaggagtggtgggaagcaaggatgaaaacataggaaaagcctgcaggtcatatgtgacagctgactccacgagggcctccggtgagccctgccttattttattaatttatttgttttttgaagacagaatctcactctgtcacccaggctagcgtgcagtggagcaatctcggctcactgcaacctctgcctcccagcttcaagcgattctcctgcctcagcttcccaagtagctgggaatacaggtgcgcgacactaccacccagctaatttttgtatttttattagagacggggt[136 bp omitted]gtggtccccctccacattgaacagggct[221 bp omitted]gaggcaggagaatggcatgaacccaggaggcggagcttgcagtgagccgggaactccagcctgggcgacagagcgagaccccgtctcagaaaaaaaaaaagagagaaatgatgggttgtgacttccagggatagatcctaagagacattgaggcctcctccttgttcttgcttggatcatttgctctgggggaagccagaagccatgtcctgaggacactcaaacagcccagtggagagtccacatcatgggaactgaggcctcctgtcaacacccagcattaacttttcatgtgagtgaggcaccttgggtgtcctagccccagccaagccttccaatgactgcagccctggctgagatcttgactttaacctcatgaccccagagccaggattagccatcagagctgctcccagattcctgacccacagaaactgtctgagataatagatgtgtattgttttttttaaactctctctctttaaattttttttcctttgcttttcctgtaagtcaggaaacaaagatacatgtatttatttacttattttttttgagacagggtctcgctctgtcacccaggctggaatgcagtggcgcaatctaggttcactgtaacttccacctcctgggcccaaatgatcctccaacttcaacctcccaagtagctgggactacaggcatgtgccaccatgcccagctaattgttgtagtttttgtagagacagggtttcatcatgtttgccaaggtggtctggaactcctgacctcagataatccatctgcctcagcctcccaaagtgctgggtttacaggcatgagccatcacgcctggcccagatttgtattgtttacggcaccaaattccaggccaatttattatgcagtaatagactaccaatataccataaggacttgggattttagtctaagtatgatggaatgccatttaaggagttcatgcagaggagggtcatgacctgacttctggtgtggaaagaccttctggctactgggtggaatctgaataatagggagctagagaagaagcaggggtctagttaggagctttttttttgagacagagtttcactctgtcacccaggctggagtgcagtggcgcgatcttgactcactgcaaactctgcctctcgggttcacaccattctcctgcctc[190 bp omitted]ttttttttttttttttttgagatggagtcttgctctgtcgcccaggctggagtgcagtggcacaatctcggctcactgcaacctccagctcccgggttcaagtgattctcctgcctcagcctcctgagtagctgggattacaggcgcccaccaccacgcctggctaatttttgtatttttagtagagatggggtttcaccatctcagccaggctggtcttgaactcctaacttcatgatccacccgccttggcctaccaaagtgctgggattacagacatgagccactgagcccagcctttgttttttttttttttgtttttgattttgagacagagtctccctctatcgcccaggctggagtgcagtggcatgatcttggctcactgcaacctctgcctcccgggttcaagtgattctcctgcctcagcttcctgagtagctggcactacaggcacatgccaccacgcccagctaatttttggatttttagtagagacggggtttcaccatgttggccaggatggtctcgatctcttggcctcgtgatccgcccactttggcttcccaaagtgctgggattacaggtgtgagccaccacacctggtgttaggagctattaaactagtacaacaggtgttgatgatggccgggacccaggttgtagagttggaaatgacagaagcggacatattagggttataattggagttagaacccacagaacttgctgacagatgaatatggtaagggaggcaagggaagaaatcaaacatgccaggttttggctgaagcaactggatattcggcggtgccgtttcctgccaaggggaggcggctgggattaccggcaccatgcccggctgtttgttatttttaaagacagtgtcttactctgttgtcttggctagagtgtattgaagctgtcatagctcactgaggcctccaactcctgccctcgagcaatcttcctgcctcagcctctcagaaaaaagtatttctaagatggagaagggtgggccaaaaatagctctaactgtttcaggaagcatgtcttgttaccctacaaggccctgaccattcactgacaaagagtgcttctctgcgcgatgtttgactgcctctccaatactctccatcctgtttcaaacaatgtgtctccctctgtagatgagccagtgttctactggactgggaggaacccagctacctcctcccattagcgtacctcccatattgaagcaactcagttttttattattttttgagacggagtcttgctctgtagcccaggctggagtgcagtggtgtgatcttggctcactgcaagctccgcctcccgggttcatgccattctcctgcctc[224 bp omitted]tattgtttaggtacagcagggggcttctttggcccttatagatctagacactgttacttaaaccctgttcgaaagacttctttgaggccggacgcagtggctcacgcctgtaattccagaacttttgtaggacaaggtgggtggatcactgaggtcaggaattcgagatcagcctgaccaacgtggtgaaaccccatctttactaaaaatacaaaaattagccaggtgtggtggcaggcgcctgtaatgccccctattcaggaaactgaggcaggagaattgcttgaacctgggaggcggaggttgcagtgagccgagatcacaccattgcactccaacctgggcaacagagcgagactctgtctcagaaaaaaaaaaaaaaaaaaaagaagacttctttgcaggatcataggatcatatgttctcatggttgcttctggttcccatgaactggtttacttgagggactctccccccatcccatgggtgtagttccttatccaagagcacagactgagatgtgaaacatacccttgccacttgtcactaaaccaactgctcacacaaggtttctatacatgtagagatctctgtaggacagttgggaagatgcagggatttacatcgtagaaacgtgagcagctttcaattcagtgtcagtgttttttctccaaaagtcctctgccatttccaccgttcaggctccagcttccttacacatggctcagccttcctctctgctctctcctctcttt[136 bp omitted]acacagcaaattggagttagaacccacagaacttgctctactaaaaatacaaaattagccaggtgtggtggcgcacgcctgtgatcccagctacttgggagactgaggtgggaggatttcttgaaccaggaaggcagaggttgcagtgagcctagatcacaccactgcactccagcctgagcaacagagcaagactccatttaaaaaaaaaaaaaaaaaaaagcagctgggcatggtgactcacgccctgtaatcccagcactttgggaggctgaggtgggtggatcacctgaggtcaggagttcgagaccagcctgggcaacatagtgaaaccctgtctctcctaaaaatacaaaaaattagctgggagtgctggtgggcacctgtaatcccagctactagggaggctgaggcaggagaatcgcttgaacccaggaggcaaaggttgcagtgagccgagattgtgccattgcactccagtctgggcaacaagagcgaaactccatctcaaaaaaaaaaaaaagcagtcactcctcattcttctccccacaccccagcccctggcaaccatttatggctgggcatggtggctgtcacctgtaatgccagcactttgggaggccg[134 bp omitted]aggcaggagaatcgctggaacctgggacatggaggctgcagcgagccaagatcatgccactgtactctagcctgggcaacagagtgagactccgtctcaaaaaataaacaaataaaaataggccaggcgcggtggctcacgcctgtaatcccaacactttgggagggtgaggcgggcggatcacgaggtcagaaatcgagaccatcgtggctaacatggtgaaaccctgtctctactaaaaatacaaaaaatcagcc[135 bp omitted]caaaataaataaataaatagataaatgaataataaataataaaataaaataaaataaaaacaggccaggcatggtagctcatgcctgtaatcccagcactttgggaggcaaaggggggtggatcatttgaggtcaggagtttgagaccagcctggccaatataatgaaaccctgtctctactaaaaatacaaaaattagctgggcatggtggcaggtacctgtagttccagctactcgggaggctgaggcaggagaatcactcgaaccttggaggcggaggttgcagtgagccgagatcgcgccactgcactccaacctagatgacaaagcgagactccacctcaataaaataaaataaaataaaataaaaaataaataaataaaatgcagagcatttgggctcattctcttactgctttgatgcaggctgacctgggctctgggtctcatcttttcttaaaacatttaccagtgattttcctatgcaaagacagtttcctccccaggaggaattttggtgtcactgttaggacacaaatgtacatgtcaacaatccctctgataatctgagagaaattaaaaagtagtaaggcactatccctgctctcaaagagcttaaaatttagtgaatgaagtgatatttacacctcaaatgctaagaagccgttcaaaaatagtcaagaatgctaggcagagatgactgggattggtatttgggaaataaagtgccagataaggtttctgggatgggagtagggctgggtatctcgtcagctagtgcctggaccaccacggctggctacctgtccccactggctcctgtctctctctctctcttcttttttttttttttttttctgagacagagtcttgctctcttgaccaggctggagtgcagtggtgtgatctcgcctcactgcaacgtctgcctgccaggtaaaagcgattctcctgcttcagcctcccgagtagctggtcttacagatgtgcaccaccactcctggctaatttgtatgtttagtagagacgtggtttcaccatgttggccaggctggtcttgaactcctgacctcaggtgatctgcccgcctcggcctcccaaaatgctaggattacaggcatcagccaccgtgcccggcccttatttttcttttcttttctttcttttgagacaatcttcctgtgtcacccaggctggagtacagtggcatgaacacagctgaccctagccttgacctcctgggctcaacggatcctcccatgtactatagctgggaccacaggcatgcatcgccacgcctggccaattttttaaaatctttaaaaaaatttttgtaaatacaaggtctcactttgtggcccagtctggtctccaactcctggcctcacgcaagcctcctgccttggcctcccaaagtgctgggattaaacagacatgagctaatacacctgacccaagactgctatttctagcttatcttctacaaactcatcttcctcttaagcttgactgtctcatttctctacttaaaaatgttggaggaggaaatgttcacctccagcatttatcttctggtgattcataacgtccctggctccttagaaaatagtcgcaatctcgtctagctttatcttctgttgcactccctctgaccaaacgccaaactatccaagcacaacaggcaacgaagattagtctcagtttctacgaatgtgcagtgaaatacagcttctgctctggaagttaagatggctgctttgcagcacacggaagaccttggtgtctgtgagcatagactaaggctactgatttcattattcctggaaatcaaacaaaaagaggcttccagtacagggaatatcaaagatcggtaagatgatacacgcatgatgctaaacttatggctaggcaacctctgctccattgctttttttttttttttttgagacagtctcacttactctgtcacccaggctggagtgcaatggcatgatctcggctcactgcaacctccacctccgggttcaagtgattctcttgcctcagcctcccaagtagctaggatttcaggtgcacaccaccatgcctggctaatttttgtattttttgtagagaggaggtttcaccatgctggccaggctggtcttgaactcctgacctcaagtgaactgcccacctcggcctcccaaagtgttgggattacaggcatgagccactgctccattgacattttgaaccagatgattctttgttgtgggttgtactgtaagttgtaggatatttagcaacattcctggcctctacacattagatgccagtagcagccctctcccaacccctgtagtgacaaccaaaaatgtctccagacattgccaaatgtccctaggaggcaaaatcatcccccaactgaaagtgtacataggctcacacccagaatcctagcactttttttttttttttttgagacagagtcttgctctgtcgccaggctggagtgcagtggcgcgatctcggcttgctgcaatctctgcctcccgggttcaagcgattcccctgcctcagcctcccgagtagctgggagtacaggcgcccaacaccatgcccgg[162 bp omitted]caagagggctgcttgagaacaggagtttgagaccatcctgggcaacatagtgagaccctatctctacaaaaaaaaaattaaaaagagagtctgtgtgtgtgtgtgtgtgtgtgtgtgtgtgtacttttttttttttgagatggcgtctcgctctattgcccaggctgaagtgcagtggtgcaatccaggctcactgaaacctctgcctcctgggttcaagcgattctcctccctcaacctcccaagtagctgggattacaggcacccacctgcatgcctggctaatttggtattttagtagagatgaggttttgccaggctggtcttgacctcctgacctcaggtgatccgcctgccttggcctcccaaagtgctgggattataggcatgggccacctcacccggccacatacatttaaaaaattgagatatagtttaaatacactaaaacctacagattttaagtacatagttgaacgagttttgataaatgtataaacctacataactctcaccctaatcaagatatggggcatttccttcacctctcaaaagttcccttctgcccttctgcagtccatccttgcctgtcctccagattcccatcttaggagttgatatgaatggaattgcagggtacataacctgttatgtctggcttcttcccttcctcatgccatttgtgtgattctttcagattgggatgtgtatcagtggcctcattcacttacttacttacgtatttatttatttatttgagagacagattcttgctctgtcacccaggctggagtgcagtggtacgatcttggctctctgcctcccggtttcaagcaattctcctgcctgagcctcctgggtagctgggattacaggcacacgccaccatgcccagctagctttgtattttttgtagagacagagtttcaccatgttgaccaggctggtcttgaactcctgacctcaggtgatctgcccgcctcagcctcccaaagtgctgggattacaggagtgagccaccacgtccagcctcattcacttatgtgtatggctgagtagtaatcccttgttcagatccaccaccatttgggtacctgttccccagctggtggatattcagtttgtttcccatttggggtgcttatgaacaatgtctttgggtggccatttattgttacctagggatctaacttttgcagactgtgaatgcagtatgggaatggggaccgtagtgtggccagtgctcatgttgtgttgtaaagttgtgccatctatttctggaccacactttttttgttgttttgttttgttttgtttttttgagactgagtctcgctctgtcacccaggctggagtgcagcggcacgatctcggctcactgcaaactccacctcccaggttcaagccattctcctgactcagcctcccgagtagctgggaccacaggtgcccgccac[179 bp omitted]cgcccaggctggagtgcagtgtcacagtcacagctcactgcaggctcaacatcctgggctcaaatgatccttgcacgtcagtctcctgagtagctggcaccacagttgtgcaccatgcctggctaattatttttatttttaaattttttgtagaaatggaggctccctgtgtttccctggctggtctcaaactcctgggctcaagtgactctcccaccttggcctcctaaagtgttgggattacaggcttggcccagaccactctttaggggtacaaagacgtgtcagaattgtctcgctggcagtatttacaacaatgttcttcagtgggacctcttggttgaatcaaagggcccaagaggagcctattgtcagtgagatatcactactacacgatgcagggattaaaggagcagcttctcctaaaaatatcactcacaacttagaggcaaaaggctcttttttttttttttttctgagacggagtcttgctctgtcacccaggctggagtgcagtggcgtgacctcagctcactgcaagctccgcctcctgggttgacaccattctcctgtctcagcctcccaagtagctgggactacaggcactcgccaccacg[138 bp omitted]cccggcctaggcagaaggctcttgccgatggagcaagctgaacatgggaactacctgttcaagaatcaacggctcagataatttcaccaggcctcacattgcaagtatcctcagtcccgaccccgaatgccagcctctgtcttcatccattgctatctccctccaaacctttcccctgtgtgattcgaagcccattatttcttttttattatatacttttttctcttttgaaaaattttttaatagagaaggcatctcgctatgttccccaggtgggtcttgaactcctaggctcaagcaatctgcccacctctgcctcccaaagtgctggaattacaggcatgcaggcatgagccaccggacccagctccctttttttcttttctttttttttgagatggagtcttgctttgtcacccaggctgcagtgcagtggagctatctcggctcactgcaacctccacatcccagcttcaagtgagtttcccacctcagcctccggagtagctgggattacaggtgcccaccaccacgcccagctaatttttgtatttttgtacagacagggtttcaccatgttggccaggctagtcttgaatccctgaactcaggtgatacacccacctcagcctcccaaaggactgggcttacagaagtgagccactgcacc[132 bp omitted]cagcctgaccaacatggtgaaaccccatctttactaaaaatacaaaaattagccgggcatggtggcacatgcctgtaatcccagctactggggaggctgaggctggagaatcacttgaaccctggaggcggaggttgcagtgagccaagatcgcgccactgcactccagcctgggtgatagagcgagactcagtctcaaaaaaaaaaaaaaaaaaaagaaaggtgcaatgaggaaggatgctcaggtcagggtgtgggaggaccttgccctgcttgtgtgtgattctgcacgtcattcctggctcaacagcctgaatgagtcctgctggatcactctcgtttctgactcacttctcatatctctgtttagatgaagggaaatcttatagataaacaagagtgttttctcgctgatgctttgtccagtactatgctctaaattggccttgaccaggtaatctggagctggcagaggtagcttctgtcattgtaactcagatgatatgagatctgaggtgcagaaatcgagttatcccttcctccttcaccctaaaccttaagtccagccactagactgtgcctgttctacctgctaactatctcttgaacacatttcttcttctttttttttttttttttttttttgtgagacggagtcttgctctgtcacccaggctgcagtgcagtggcgcgatcttggctcactgcaacctccgcctcctggattcaagtgattctcctgtctcagcctcccgagtagctgggactacaggcatgcaccaccatgccctgctaatttttgtattttttggtagaaacagggtttcaccatattggccgggctggtctcgaactcctgacctcagatgatctgcccgcctcagccccctaaagtgctgtgattacaggcgtgagccaccgtgcccagcagtgttagtgtagtttatgtgtggcccaagacaattcttcttccaacatggcccagggaagcctaaagattgaacactcctgagctaagggaaatggcatgtaaggctggagggggagggactgagaacacagatggggaaaaggaggaaaaggctgtcttcctgcaggaacatagaaagggaaagagaagtggatgaagtagatgagaaatctccaagggaaggccttggtcttcttctcaatagactcatcttggtactcatctgaagacacgggaagcttcagaaaaatgaagaaggattggtatagctgcttggggttgctagacaaccaacaagacttggttaagggacctcagatctgcaaagctaattcagggtgaatttagagtgggcacattggcatgttctggcttgagtgatttgatttactcatgtagcaaaattttatggctgaggggactgacagaggaagtggtcaggcagatggagagttgcagagcccttgaaactagcaggcattcagtgcaatttcattgagtgatattcataaaacccagtggagctgaaaaaccagtgtggccagagggggctgagaggttcaaagtgaagtgactgtgctacatttgttaatcttccaaaggcagccaactagatcttaaggggtcaagtggaaagatgtaatatataggtagcctgctagctcaattcaacaaatgttaatggatacaaggcagcaagtaaggtgctgtggaaactgctaagataagccagctgcccgcagggagtttgaggtcttacaaaaagagcaatgctgtataaagcagacttttgcaaaggtggcaatgcagacacagagaaggaggcccagcattatatatagagagagtcaatgactaaaacccagggagaggctgggagtggtggctcacacttgcgatcccagcattttgggaggctgaggcaggaggattgcttgaggccaggagtttgagactaacctgggcaacatagcaagaccccatctctataaaaaataaaaaaattagctgggtgtggtggttcgcacctgtagtcctagctactcaggaggctgaggtgggaggattgcttgagcccaggtgttcgaggctgcagtgagctatgatggcaccactgcacttgccagactgggtgacagagtgataccctgctctaaaaataaataaatatgtacatacatacaagaaaaaataaaagtcaagaaaggtagcatttgaggtgggcctttaggttgattaagtatttatttgcatgctggctttactgataagaaagaaccgtcaggctgggtgcggtggctcacgcctgtaatcacagcactttggcaggccgaggcaggtggatcacctgagctcaggagtttgagaccagcctggccaacatgttcaaaccctgtctctactaaaaatacaaaaattagctgggtatggtggcaggcacctgtaatcccagctactccggaggccgtggcaagagaatcacttgaacccgggaggtgaaggttgcagtgagccgagatcaagccattgccctccagcctaggcgacaagagcgaaactccgtctcaaaaaaaaaaagaaaaaaagaacctttaaagcaaagcgtagggaaccaaccatgtgacgaaggagcagaggtggaaaggtctctgtcacgtttaaagaatggtggttaatctatgtggctgcaggaatagtttagcctgtggggacttagacctggaaacgtatgtctgagtcaatttatgaaggactttgaacatcaggcagaaagatttggacctatttgcaaaggtgaactatcagtttttgtgtgcaggttagtgacatgattcttatggcgttttaggcaacagctaaactgggtcatacaagattaggtactaaaatgccatcttcttgtccagctgagaaagggattttaattacgtaattaaactcatgaatgtgggaaggggctcttacttcacaaggccaacctcagctctttcccaattatataaacaagtttttgtttgtttttttgtttttgttttttttaaacaagccttccagacttagatctctgggaaaagagaagtaaatactgacacaggcttgctttgttttcccaagagaggtctcccaggcgatttatctaattacctagaaaaaaaatttaacttgtttttccctttagatttcagccgagctggaagcgggaggggggaattgcagtattgccttagattttctagatttggtttggacgcaatattcgtcctgagggagtccctccaaggcctctcggagcgggcagcctctaggcatttgttcaaggcaacaaggagggagcttagaagaacttaagagaggcggggagctctgcaaagggcttattttaaaaagaaagggaaaaaaggtggggcgcgccgtctatctttttagaataattctgtaggaaaacgaatcggaggtaaagccatgccctctggtcagggtttctggactagaaactgcctgagctttacgcacaggaaaggacagtggctcttcactctcccggccgcatcactcggcacctaattccgccaggctcccagaggggcggttgcagctacagcctagcacgccgcgtagccaataagaagccagaattccccctattctcaaatcctgaccaatcggtggcctgaactttagctctctggccggcgcctctgttgcccggaagggaggcaagcccccttagagttgccagtaacggacatggctgcggcccccggaggaggggacgtgaagtgaggagggggttgggaggggagaggacgcgggcgaggaagaccagccccggggccccggtaagtacgagaaggcccgtggcccgaaagtggggagcaagggggcgtggggctcggccttgcgcgtcctttggattcttggccaaggaaaggggagtctggggtctgcacccagagaacggcttaaggggatgcctcctgagggggagtccagggactggctctagtctccagctcttgaccattgccttcccccgagtcttcagactcttgctctcagccctggattggtccattgtggggtctctcgccagaaataaagcctctcgccaacaaagaatccctgccccaggtctgtcgtgcctaggccctggcccagagggctcccaacgccgacgccctgagtatttatttcgaggcccctgggagtcctcatccccgacctaaataaagaccgttgtcccgcctgcgcgcgctctccgcagccgcccggggtcctcgcgcggccgtccccagctggatggagccggccgaggggctcctggcagccatccctgatcttgcagtttggagcgggcttttttttctttccgcctttccagaagcgttttcaggctcctcggaagctcaccatccatgccatcggataaagtgactcctgtggaatgccctcgttcctgtaccgcacacccctggagcccaggtctcctggttcctagcatgccacgatgcggcccctgcccgctgcccagcgccagatgcaagcaaagccccgctctttcattggtgtgtcaccgcgggctaaactttggcgttgccttggtcacgtgctgctacatcccaccctctctcctgagtttttcggtggctcttgagggaaaaaaggagggagctcgttatggaatctgttttccttctgctatgtgggtgtatgcattggagagaaggatctttttctcatgatttatccaagacgctcagctttagtgacatagttgttattccgcaggtaatcttggaagatggaagcagggagggggcagttttaacattttcattttgcagatgtggagattgttcggagaggcaaggccagggtcacctagagccaaactagaatccgaaagtccaggggcttgagttctttatccgctagacctagttgtttcctaggtgtgacctgaggagatcaagttccctgactcccctgagctcttgcagggtggctctgggcattaaaagcgatgggcattaaaagtaggatcctcctatgcttcctggcaatgactagggtcttcatacctggtttgcattcagtaattttaagaagccagcaggtagttctctggcagacttcttgtattaatattcattgtagtctctgtctgtattgggggcgtaaattattttagtgattctcagggcagcgagaggcagagtaagaggaaggtatgcctcttccttggtttttgggaaccattacagtgtcattagagatgttattaacaggaacgcgttgcatacaggaacagcgtggaggcagaaaaagattgagagccattgaagagagaagaaatggcactgtggtatctctttatagtacttttggcaaaagaagagctgatcttggtattctgaagaggtagtttaaaaaaaaagttagatcctgaggcataactaaaagaatacaaataaataaaaaaatttaaagcaatggcactagtaaggttcaaaagagtcaaagtaatgcctgtaatcccagcactttgggaggctgctgtgggaggactgcttgagcccaggagtttgagatcaacctgggcaacacactgacaagaaaaccaaaaaaattagctgggcatggtggcatgtgcctgtgttcccagctacttgggaggtggatgccagaggatcgcttgagcccagaaggtcgacgctgcagtgagctgtgatcatgccactgcactcactctagcctgggcaacagagcaagactctgtctccaaaaaaaaaaaaaagagtcatggaatcaaaaagtttgaaaa[136 bp omitted]cggtgaaaccccatctctactaaaaatgcaaaaaattagctgggtatt[169 bp omitted]aaaatgtagactatggtggttaaccctagaacaggagacagcatgttcagataaaatcctcaaacattgcaagtcttagctgctatgttagctctaacttccttgctcactggttctctttgtcaaaactgcaaacagggaaactggtggatactgtggagtagtgcaatgaccagggaggtgaagtacaaaccatcttcttcatcatcagcccccaaataattgagagttaactgcccttgaaccaccagaccaccatgccccttgtttgtggtgacttgacatcagatgagactgggagagccaggccttgacagtgaaatggaagagaaaccccatggcatttctattttgagaagttgctaggtgtgccagctcctagtgctgagaaccagccttttggaaaccttaactcctgtagaaactaatgagaaatgaaggttgtgatcgtcctgttcctgcctgctgctctctccctaagttgggcttgagaaacagtttctataggagagggaggagtcctaatgtaaataccacctacacccaaggctgtatgtatttagcttaatctgatgaatcaggttgaactcgtaccttagcagtctaagcctgaacgccataaagcctttaagtccattcctggtgttcaagtgagaaggttctgggtcaggcgtggcactggttggtaaatatgtgtcaatatttcttatcttactattgtgttagtgttgtttttacgatggtgtctttctttacccaaatgataggatttaaaaatattgtttaaagcccgtttccaagcaggcctgggtttgtttatagcagcacaggtgaactagagggtaggccatggctgaaacaggaatgcttttcttccgagcagacccgccagccagaatgtgtggtttggtgatcaggggtttgtgtaataataagctttgcctgtggccactgagacggtagtaaacagtatgggtcacatggcatgacaagtaggttaagggccagatttagacactgatggcctgcgtaaggaggagcaaaccacacactgcttgctttgggtttctctagctcccaaggccagaagtgatgggagaggggtgaggggtgtcagagagaagaaccttgaaaggcttagagtggtatttgaggaaccataaattttagtgtactataattaaatgaacccaattttcataacttcaagggcttcttgaaaaaggggttcatggtaccagtcttgcttggtagggaggtgaatagaaaaatactgggaaacacttaaaaaagatgtatgctggacaaagactcaggtgtactgaaagagcgtaaaccttcattatgttgacgtgaaagccaagtagggaatgttgcttagctataaggcagagcctattgcaaaatcagaatcaggagctgctgatttttttttttttttttgagacagaacttgctctgtagcccatgttggagtgcagtggtgtgattacggcttacggcagccttgatcttctgggctcaggtgatccttccaccttaccccctgagtagctgggaccacaggcacatgccaccacacctggctaatttttgtattttttacagagacggttcttgccctgttgcccaggctggtctcaaactcctgtgctcaagggatctgcctgcctcggcctcccaaagtgctggaattacaggtggccagaagttgccgatttttaaaattaaggaaaaaaatacatagtataacattttccattgtaaccagttctgtggcattaagtacatttgcattgttgtgcaaccctcatcactatccatctccagaactttcttagtttcccaaactgaaactctgtcaccattaaacatttaactccccatttcccccctgctcccacccccggcaaccatctttctactttctgtctctgtgattttgactattcta[133 bp omitted]gcaatctccgcctcccgagttcaagcaattctcctgcctcagcctccggagtagctgggaatataggtgcacactaccgtgcccggctaatttttgtatttttagtagagccggggtttcgccatgttggccatgctgatgtcgaactcctgaccccagatgatccgcctgcttcggcctcccaaagtgctgggattacaggcatgagccaccgtgtccagcctgaagttgctgatcttttaaagacatattggatacattcacatggtttgaaaatcaaaaggcacaaaagtatatgtattcaagggcagaaaaaagtataaaaaagaatttttttaaaaagtatatatagtaaaaattcttcctgctcccaaccattccctagccactcagttccaatttattaatttttccttttgtggattatgcttttggtactgaatctaagaaatgtaatccacagtaggccgggcgcagtggctcacgcctgtaatcccagcattttgggaggccgaggtgggcggatcacgaagtcaggagatcgagaccatcctggctaacatggtgaaaccccgtctctactaaaaattagctgggcgtggtggcgggcgcctgcagtcccagctactcgggaggctgaggcaggagaatggcgcgaacccgggaggcggagcttacagtgagtcgagatcgtgccactgcactccagcatggacgacagagcaagactccgtctcaaaaaaaaaaaaagaaaagaaatgtaacccaaagtcacaaagattttttcctatctcctatataaattttacagttttttttgttttgttttgttttgttttttttttttttgaggcagagtcttcttgctctgttgcccaggctggagtgcagtggcacgatctcggctcactgcaacctctgcctcctgggttcaagtgattctcctgcctcagtctcccaagtagctgggactacaggcgcccaccagcactctcagctaatttttttgtatttttagtagagacagggtttcatcatgttggccaggatggtctcgatctcttgacc[135 bp omitted]tggagaagctattggatttttggtttcacattctctcagggttagaattgtcttcctaccctccacctcatgtattaattatctccataatttctcagcttctgcttggttccctctagtgatgggagctcattgcttcacagggcagcctattccatttttaaaaatatacagttctaaggctgggcatggtggctgacacctgtaatcccagcactttgggaggccaagatgggaaaatcgcttgaggccaggagttcgagaccagcctggtcaacataagtgagaccccatctctattaaaaaaaattaaaaatatacagttctaggcttgactcagtggctcatatctgtaattccggcactttgggaggctgaggtgggaggatttgcttgagccccagagttctagaccagtctgggcaacatagcaagaccttgtgtctacaaaaaaaaaaaaagctggtcatggtggcatgtgtctgtggtcccagctactcgggtggctgaagtggaaagattgtttgagcccaggagtttgagactgcagttgcagttagccatgatcatgccactgcactccagcctgggcaacagaatgaggacatgtctccaaaaataaaaaaagtaaaaaaaaaaaaaaaaaaaaaaaaaaaaaatatatatatatatatatatatatatatatatatatatatatacacacacacacacatatatatgtgtgtatatatatgtatatatatacgtgtatatatgtatatatatacacgtatatatatgtgtgtgtgtgtgtgtgtatatatatatatatatatacagtttaaattatgtagaaagatactgtacattttaagtctcagtctacttcttatagcatcctagttcctgttttggggcctcccagagtaagcctggcccttctcactgcttgtagccattatacctttctagccctgcttgcacccaaagtgtgtttttagggtactggctaagcatcttcagttcattctgccatttctcacgtcttagtttctccaacctggttgctgctctctgaaatccttccagttttgttagtgtccttcttaaagtgtgtgatgcgcaactgaacaagatattccaggtatgctctgacatgtacagaaatcagacttcctcgtctgttgttagggacacaggtatctgttaatgcagcctaaatgtgaatgaactttgagtgagcatacactcatattgaaattgcatctaactaagccatttgtggtagttttatacagtagtttttgaacctaagtgcaggacttaatattttttccagttaaactgaacccctttgatttggcccatcacttcagcctgttgagagcttcttggattttgactttgatctcctttccaggtttatgctatccaagaatttgattagcataccatctgtttcctcacccaagtcattgataaaaatattgactgtaatgccaccaaggatagaatcctacagcttgctattaaaaacttccctccagcttaacacagatctatcaattagtaccctgtgggcacaactattaaaccgaatacagatccacctaaccgcatttttggtgtgttgggcatggctggcttacaagcacagctaatgaagattgtgctagaagggattagaaggacagccaactcctcatcttgccctcaacctgagccttgggctcccacttagttctttttgaccttgtttctgagcttggcagcaggaggcatccacccctttgtcttcatggctactgttgccagctttgtctagatacttggcatggcaaaccaagattatcatcattttcttctaactcttctgcctataatttctttccttttccctctgatccattttctaccctcttaaaatactgagaacagcctgggcaacatagaccctgtctccaaaaaaaaaattgtcaggcatagtggcacatacctgtgatcctagctactcgggaggctgaggtgggaggatcacttgagcctgggaagttgaggtacagtgagctgtgatcgcaccactgtactccaggctgggcaatagggtgaggccttgtctcaaacaaacaaacaaacaaacctggggcctactcagaaacccagactcttcagtgactcctcagagcctctccattttggccccttatccctgtgtattttttcattttctttctttctttctttccttcctttctttctttccttccttccttccttccttccttccttccttccttccttccttccttccttccttctttctttctttctttctttctttctttcctcttttctttctttcttgagacggagtttcactcttgttgcccaggatggagtgcgatggcatgatctcagctcactgcaacctccgcctcctgagttcatgcgattctcctgcctcagcctcccaagtagctgggactacaggtgcagtcggctgatttttgtatttttagtggagatggggtttctccatgttggtcaggctggtcttgaactcccgacctcaggtgatccacccacctcagcttcccaaagtgctgggattacaggcatgagccactgcacccggctctttttgttgttgttgttagagacagggtctcactccgtttcccaggctggagtgtagtggcgtgatcatagctccctgcagccttgaactcctggtctcaagatcctcctgcgtcagccatattctcagtctttttcattttagtcgttctaatgggtgtgtattggtctctcgttgtggttttaaatttttttgtaagacagggtcttgctatgttgcccaggctagtctccaactcttggcctcaagtcatcctcccccgtcagcctcccaaagtgctgaaattacaggcgtgagccaccatgcctggccttctcattgtggttttaatttttgtttcccaataattaatgttgttgaccatcttttcatattcatattgactgtttatatatcttgtgaaatgtctgttcaaatctctgcctgtttattatttatttatttattttaagacaagttctcactttgttgcccaggctggagtgcagtggcgagatcatggctcactgcaacctccaactcttgagctcaagtgatcctcctgcctcagcctcccaagtagctaagactgcaggtgtgtgccaacatgcctggctgaaatctttgctcattttaaaattgggttgttggtcttgttactgagctataagaatttttatatatatatatatatatatatatttttttttaatcccaaagacttcaaaactacttttgctttttgagacgtgattttggtatgttgctcaggctagactcaaactcttggcctctagtgatctgtctgcctcagcctcccaaagtgctaggattataggcatgaaccactgtgcccaacgtcaatttttttatggcatattttgaagagtggaaattttttttatttttatggaacaatttatcagttgttttcttttatttgtttgtttgttttttagaggcaggatcttactctgttgcctagactggagtgaagtggcacaatcatagttcactgtaaccttcaactcctaggctcatgtgattcccctacctcagcctcacaagtagttaggactacaggcgtgctccaccagacctggctaaagttgctgtcttttatagtttatgttttttatgttttaagaaatctttgcttatcccaagttataaagattcctgcctccacccctcctgcatattttcttctggaagtattatagttttaacctttatgtttagatgtgtgatgcattttaagttaatttttgtatatggtatgaagtaagggtcaatatgtgtgaatctagtgctagactctctgttctgtcccattgatttgtatgcctctccttgtatcagtaccacatgttttgattactgtagctgtatgttaaatcttcaaatcaggtagtgtaagtcctcagaatttgtttctcttttcaaaattgttttgcctattcttggtcctttatctttccatacaaattttagaatcagcttgccaatttctatggaagtccca[133 bp omitted]tgaaaccccgtctctactaaaaatgcaaaaaattagccggccatggtggtggacacctgtaatcccagctgttcgggaggctgaggcaggagaatcacttgaacccaggaggcagaggttgcagtgagctgagattgtgccattgcactccagcctgggcaacaggagtgggaaaaaaaaaattgtattaaatctataaattaggggataattgccatcttaatactgagccttccaatccatgaacattgtatatttccccatttatttaagtcttctttaatttttctcagcagtgtacaggtcttacatatatttttattagaataatttctaaaggtttttttttttttttgagactgagttttgttcttgtcacccaggctggagtgcaatgatgtgatctcggctcactgcaacctctgcctcccgggttcaagtgattctcctgcctcagcctcccaagcagctgggattacaggcacccaaaaccacgcctggctaatttttgtatttttagtagagatggggtttcaccatgttgtccaggttggtctggaactcctgtcctcaggtgatccacccacctcagcctcccaaagtgctggggttacaggtgtgagccaccgtacccagccatgctgtttttatactattataaatgatattaaaatttttattttctgatatttgattatagtatatagaaatatatttatattttgtattttgaccctatatcctgcagctttgcacctttatttgttttagtatcttatttgtagagtccctaatattttctccatatacaattgatcttgtcttctgcaaataagacagtttcacttattttttcccatcattatgccatccatttctttttctttttttttttttttttttttttgagacggagtctcgctctgtcgcccaggccggactgcggactgcagtggcgcaatctcggctcactgcaagctccgcttcccgggttcacgccattctcctgcctc[224 bp omitted]cacctaagtggcacttggttcatattttttgcttgctgctgatagtaatggcagttgtttattgagtacctactatatgtcaaatattatactagaccccctgcatatactatttttcataattctatagctcctctgtgaaatagatattgtcatttccattctatgaacaaagacactgaggctcagagggacaaataatttgccaaggtcattggcgtttgagacatactggagctaggatttgaacccggggatatttggctttgaatcctgtgctttttttcacaatgggctaggagcagaactggccctttaaagaccctgctacgggtttcagatcagacagttaagaatggctgtctcccagaatcccatgtatggaatgatgggaaaacagagactcttagaaaaatgtcctgttcctggctgccctctctgtactgctgtggttccagctggccacagagtgattttgcctttgcagcgttggcagaaggagttaacaggcacagtccccatctggctcctggtgtttttccctgtgtggcaacgatctcatccagcccctgctgggatggggtgtcatggggaccttgagctgcagtcgtaagcaggactggggcagcctgagtcagacagtggccttggggaggagtggatttggtccctcaggatcccatttcagttggcgaccaaagactgaatgtcactgcattgcaaggccacttccagcgtcactgtctgtatctgagccttcgaggctggctcagctttgaaaggcaggggtggaagagacgtggttgctcagcctagggcaccagcatgggtgccaccttgagaggaattgggcggggttttggagtggagttggtggcagaacctgggccttctggttgggtcctccggacacagcttttattatttcttgacagcttttttctgggtcagttctgggtttctgcctggcaccccttgacaaggcttgctcctggcccccaaaagagctgtcttagtcagtaggttagtgctttctccaagaggagtcgcttggcatcaaaccagattgctcagtgtcactctttactcaaacacaccctggtctgagatcattagagtgacggctgccaggacgggagggtgagggctggtgagggtaggtggggaggtagggcaaacctcattttccaggtaaccagcccgcttttgtcggacctgttgtcagattgggctgcccatcgtgtgttcatctgctcaggtgcctgttgagcactgcactcaaccacgtgaggggctgcgggcttgcacatgctggtgagtgtggcgtctgactgccagcacgtggaaagaagtcagtgcctcgttctggggatgcagtggacatccaccctgctgctgtcccagctgcccccttattatccaacttacatatctagatttcacttgatgttaaggctaaccttaaccctaaattttttttttttttttttgagaccgagtctcactttgtcgcccgactggagtgcagtggcgcaatctcagctcactggaacctctgcctcccaggctcaagtgattctcctgcctcagcctcctgagtagctgggattacaggcgcccaccaccacgcctggctaatttttgtatttttagtagagatggggtttcatcatattggccaggctggtctggaactcctgacctcaagtgatctgcctgcctcggcctcccaaagtgctgggattgcaggcgtgagccactgtgctcggccttaaccctaaatttttaaaatgctgactgggtgtagtggctcatgcctgaaatctcagcactttgagaagccgaggcgggcagatcacttgaggtcaggagctcatgaccagcctgagcaacatagcaagaccccatctctaccaaagaagtagtgataataaataaaaatgccaataaatcctttgggaggccgaggtgggtggatcacctgaggtcgggagtttgagacgagcctgaccaacatggtgaaaccccgtctctagtaaaaatacaaaaattagctgggcgtggtggcacatgcctgtaatcccagctactcaggagtctgaggcaggagaatcgcttgaacccaggaggcagaggttgcagtgagccgagatcatgccattgtgctccatcctgggcaataagagtgaaactccgtctcaaacaaaaaaagccaataaaccaaggcttttcctgcatgctgtaattcagtgataaacagagtacatatggaacaaaacacagtgtgcctttgaaaatgaaggttgaggctgggcacagtgattcacgcctgtagcctgtagtcccagaacttttaagaggctgaggtggggaggattgcttgaggccaggaggtcaagaccaacctgggcaacatagcaagaccccttctccacacaaaattaaaaaaaataataataggctgggcgtggtggctcatgcttgtaatcccagtactttgagaggccgag[185 bp omitted]gtggcgggcgcctgtagtcccagctacacaggaggc[164 bp omitted]attagccggggatgctggtgcatgcctgtaatcccagctacttgaggggctgagacaggagaatcacttgagcccaggaagtggaggttgcagtaagcaaaggttgcgccactgcactccagcctgggcaacagagcgagactctgtctcaaaataataataataataataataataaagaaaatgaaggtcaggcgcggtggctcacgcctgtaatcccaacactttgggaggctgaggcgggtggatcacaaggtcaggagttcaagaccagcctggccaatatggtgaaaccccgtctttactaaaaatacaaaaattagccgggcgtggtggcaagtgcctgtgatcccagctacttgggaggctgcagcagggaattgctggaacccaggaggtggaggttgcaacaatgagccaagatcgggtcatagcactccagcctgggcaacagagtgagaatccgtctcaaaaaaaaaaaaaaaagaaagaaagaaagaaagaaaatgaagggtgaaagagagaaagtttgtacccctccagaatcctctctgtagccctctccctcctggattcagagagtggaattcatctagagctgactgcctgggggaagctctgctgctcgatgaggctgactctgtctgatggtcagtgagttcagtacttttccgcgtaccatactgtggtttagatgatactattatgttgggtggctgaggcgggcagatcacttgaggtcaggagtttgagaccagcctggctaacatggcaaaaccctgtctctactgaaaaatacaaaattagctgggcatggtgatgcacgcctgtcatcccagctactc[136 bp omitted]tagctgcctgttccagcaacctgagtgatttctttcttctttttccccagatgttgtgactgtgacagactcactggggtttgtacatgctggggaggagccttcctttcaggggtgaccacattcatctgggcatgcctgcagtactcttggcccatggacctgaaggagaagcacctggtaggccatatcctattaccttataggtattgtctgtgtgtctctgttgaactctttcctacttgtttttgcctgggagatccttaactgggggctttaaacaaaagttgagagaggaggcaaggctctgagtcttgggggatgcgactgtgacctcttggctggaaagcacagactcacagagctatgaataaaggatgaaggtggacctattaacacaaccgcatgggagcagggtttctgatttaggctggctccaagccagtcttccacttcttgcccaggggtgtgcaatttagtttgtttgccctttgctagggcgatgtcctaacctgctgagccatgctgagggctattgggcacctccctgtggttagagaagagcgccccaatcagacttcaaacacagctgcctaatcagccggtggtgagcagccaggtggcctgggccagccataagattggtcttctcctcccagcctggtttggcccagcctccatgtatactatctttggatggaggtagagttgtcaatcagaaaactcctctcccttgacaaagactgccccagaggaagtccttttgtctcttgcctagcttctgccacaccttcctaatagatctttctgttttctgtaatcccagctacttgggagactgaggcaggagaatcgcttgaacccaggaggcagaggttgcagtgagcagagattgcactactgcactctctgctcatcagcctccacatggctgccacaaaactggtcagtggttccataccacctacttaacctttagtgtgtacaaagccctccagaatcctgctcctgcccatggatttggtgttcctagccttcctgctttgactttagcactagttattacctctaaaatgcttcccacccctttttctggaaacttcttctgttcttccttcaagacctagttttgacatcattttctccagttaagtcctccttccttccagaggtccttcctttcagcatttgtagtacctccaccattgtactcgctattctattgaaattaactcatctcttccacttcatctcaatatccctagctcacagcaccgagcctggcatgtagcaagggcttagtacatatttattgacctgaacttctgaatagtgatcttccttccagggagatcttgggaaggtctagagagggggctgtgggttcactccctgggcctctgctggcaccaggctggctgactgctttctgttcagctccaggcttcctatgtctctggaccagctgtgcaataggtttctggaattgaacttgaagcaggtgtgcttggcctcctgttcatagccacctctgggtgctcagcagatatccaccctagcagtgattggcacagagggaaagctacacttgcctctctcttagctgggagttaaggctgctgcaaacagctgcaagggctctgcactgctcagttccaaggagtatgtccccagaggctctgctgttatgcaatgcggtggcctgcctgggtgaggctgaatcccccaaaacagaggatggtattgtcttctggttccagccagaaccactgaacactagtgcctagtgtatgggggaaacaaagttctgtatcgaagggctgggtgctctctccagcctgaggaagaagacttgagaacccagctggatagctctcaggggccatttttcctggagggtttctctttgtcctcctcctctttctggataggtgagccctgacctggaaagcatcgtcagtcatccttggcagtcaccatattgtggaatggcagctttgggttggcagagctttaggcaccagggaggtggccccggcttagagaggcttattgtctagtagaggaattgatagtacaagcaggctgggcacagtggctcacgtctgtaatctcagcactttgggaggccgaggtaggcagatcacttgaggctaggagttcgagaccagcctggccgacatggtgaaatcccgtctctactaaaaatacaaaaattagctgggcatggtggcgcgtgcctgtaatcccagctacttgggaggctgaggcaggagaatcgcttgaacccgggaggcagaggttgcagtgagcagattgcactactgcacttcagcctgggcgacagagcaagactgtctcaaaacaacaacaaacaaaatggatagtacaagcagttaagtaattggacctggtagggcctctagctgaggtaactcatgagttgtataaatggacttataaagatgatctcagccaggtgcagtggctcacacctgtaaatcccagcactttgggaggccgaggcaggtggatcacctgaggtcaggagtttgagaccagcctgaccaaaatggtgaaaccctgtctctactaaaaatataaaaattagctgggtgtggtggcacacacctgtaatcccagcactttgggaggccaaggtgggcagatcacctaaggtcaggagttcaagaacagcctggccaacatggtgaaaccctgtctctactaaaaatacaaaaattagccaggcatgatagtgcatgcctgtaatcccagctatttgggaggctggggcaggagaatctcttgaactcgggaggcagaggttgcagttagccgagattgaggtcacaccactgcactccagcctgggggacagagcagaatctctaaaaaacaaaacaaaacaaaacaaaaaaccaaaaacagtcagaaggtgtcttggaggagtaggctttggaggagctggcatagtggtcattgatggtaggagggttgtcgtcccctggcttagctcaggagcggtttagctcttgatggttctctgcttctgatccatcagttcggtctctccttcaaagccctcacccctgtccccggtcctccagcccacagtggccctgctgtggcagtgacagcctgggttcctgctgcttgggtgcagggctcccttctccatttgctgaggtgggtagtgtaggaagggaggcagggcccagagagggctgtgctggggcctgcacagcacgtgggctagtccctgtgtgctgttctttttggggcctgtcacatagaagggacagtgtttgtggacttgtagctcccacccgagcagtgcctcagggacaggagagaggggacaggagtctttctctttggctacagccagattgcagagcagcagcatcctcacagtggctggcgtggaagctgacccccactgccaacctttccttctctccatggagtcttcctgttcttaacctctggactgcccgggccctcccttctgttctcactcagcactctgtttgggggccgcacagggagttgcactcatgaaagggaatggggaggctggcttgggctgctgaggctccttcttccctgcagcttgagatggtgtcgtctaggaaacggagggccctggagaaacatgctcaggctccagctcacactctccagctctgggacctgttaggctgtttcctctcccctggggtgtgtaaccccattataaggatggttttaggcagagaagtgtcccatccactccccatgcctcggcccctgcttcacccagggtgcctgtgctgagagcatcctgtatgtcaaactcgcggtccctgaatgatgcctctggagccatgactcactcaggctctgcctgatgctctggcatgtgctgaggcaggagccccaggtatctggcctcctttctgcctgggggatgcagggcctgggcattcccgggcagcctcatgggcccagcagcacttgggccggtgtgtctgaatgtattggggcatcaccggctgctggcccggctcttccctgcatggctgtgagggtctccgtgctacctggcaggaaggtgttggagtcttcagaggccctttgggctggctcttccctccctactggatccttccttctgtcagctgcctggccttgggctttgccttcctagaagtcactgctcaaatcttctcagcggccagtccatcccgtccccctccacacaggatgtgctactattaataacccacaagtcccctctcccctccttcctgcagctgtaactatggaaagggctgttggcttggctccatgctggggagttgccgtgtgatttggggacttctcatggatgatgggctcacccagtgacttggggacaaaggacaggtagtttgggaagagagctgggatttgtgtgtcccagggttccccttgatactggcagttgtcttcaggtttctgggacaggggcagtttctcctccatctatccctctgtctgtccatatcctggctgcatggtgcccctcagctaaccccactgtggcctcctctgaagaacaggccaagctcctggatatctggcagcgcgttggacaaactttctcttctcaatgctcctgtttcctccctccttctctttcctcttctcccctccctcccgcccttccagggctgctgcctcctcctccctccctgaatctgcagcgtgactagaaataggctgaattaatcagcagattgaagctctgctctgctgcgcctgattctgtgcagcacccggcttcttgctcacacactctcagctgtctccgtctcttctctcctcttctctctctctctcttttcaccctccccgctttgagggaggtgttggaagttcttgcagctgactgcttgtggctcagactctggcccatgctctttaagcaggcagagctatggatgccccatcagggcaaaggcaacaaagtgagtatgctggcagggcttttacgcttctctttaaaatgctgtgttccctgctttgtgtgggagtcttcgggttagcggttgctgtgagagtcctgaagacaatgcaaaatgggaggctgcttgaatgagcatgggtagctgggacctgggaaggggattgggaatgagagccagaaggccagtgtgcctgggtagctgccagccaggtgcccgagtcacccagagcaggactggacccaagcctcccaggggataccctgccaaggcatgtgaggacctgggtttccatgcacaggtgacagaagctcagggccaggatgccatccctcctcagggccaatgaaggcactttgaaggcacaaggaaggaccatgtggggaactaagacaagagccaccagggtggggaggattttttcctaggtcctggtggctacaggaggtggggaagaatgtgggtgaaagtactaaggtcagcatgagccaggaaaaggaggaagcagctctgctcaaggctctgatttgcctggctgcagacagtccatctgtgtctggcccaactcagaagagtgtatagtggctgaatctctgcttccgtgattcgggcattgtgtggagtccagctttgtgtcgcttccatacctgcactgacgacgacagtggggacccagagagggggccaggcctgaaa[133 bp omitted]tctgctgttgtcaaggctgaaggtcaaggtctaaattcataacctgtctacctgagcttaggggaccttgattctattgttcctaaaacagctggagtaggaaggagagcagctgctgtgcccagaacgtcgtgcaggagctgtgaaaggggacagggcggccgggcgcagtggttcacgcctgaattcccagcactttgggaggctgaggcgagcagatcacgaggtcaggagtttgagaccagcctggccaacatagtgaaaccctctctgtactaaaaatacaaaaattagccaggcatggtggcgcatgcctgtagtcccagctactctggaggctgaggcgggagaatcgcttgaacccgagagacggaggttgtggtgagccatagcaccactgcactccagcctgggcaacaa[138 bp omitted]gcctc[226 bp omitted]aaaagaaaaagaaaaaaaggaaaggggacagggcctggggcttgagggtttctgactctgggtcacctgagaaacctgacggaagcggcacaggagagctcaggtgtgtcggctctcgaaggcgccttagcctatccgggtgctcagcttcagacctccagagctgggcctgctcaggggcagactccttgtggttctgatttgatggatagagttctttcaccaccctgctcttcctccaaatccccacgccctgccagcgtccctctttgatgatagaacagagagagcaagccctgtgttgggcgtttgttgcctgcctctcccgagtcaggacttccttagagccgtgttattttctcctcttgctccagttaagcctgagcagtgaaaacagcggaatggggtttgttctgcctgaaaagcatccgtgtaatttgagaagtagggcctcccttccccttggtgtggtgggagtttctagcatgtgggaagctctgagaatctcatgtcacccttgggtacttaaggccaggttagattttttctcagtcatcttggccccaggaggcaagaaaaggcgacctcagcttgtgtgtgtcaacccggatttctgtttctcagataataagaactgcgcctgttccctcgctatgccctgccattggtgcccaggtacattgggtagccagcctaactccatgctttgggaaaggctggcagagcccactcacccaccaacccattctgaacttccttcagaaagtatgaaggtcttctgctcttatgtcacatgtcaaagctgaggcacaatgagcaagaaagcaggccaggcacggtggttcacgcctataatcccagccctatgggaggcgggaggattgcttgaacccaggagttcgagaccagcctgggcaacatagcaagacctcatgtctacaaaaaaaaatttatttttcatttattattattattttttgagatggagtcttgctctgttgccgaagctggagtacagtggcgcaatctcggctcactgcaaccgccgcctcctgggttcaagcgattcccctgcctcagcctcccgagtaggtgagactacaggtgcccgccaccatgcccagctaatttttgtatttttaatagagacagggtt[133 bp omitted]tggctcacacctgtaatcccaacactttgggaggctgaggtgggcagatcacatgagcccaggagctcaagaccagcctgggcaacatggcgaaaccctgtctctactaaaaatacaaaaaattagctgggtgtcgtggcatcacctatagtcctagctagttggaaggctgaggtgagagaattacctgagcctgggaagtcaaggctgcagtgagccctgatggcaccattacattccaacttgggcaacaggagtgagaccatctcaaaaaaacactaaaaacaaccctatctgggcttggtggtacacatctgtggtctcagctgcttggaggctgaggtgggagaattgcttgagccccagaggtgggggctgcagggagccgagattgtgccattgtactccatctagcctgggcaacagagcaagacccggtctcaaaggaaaaaaaaaaaaagagaaaaagagcgagagagagcagtgacttgacccttaatttcgaccccctgctggagagggaagaggtgaatgcctgggcagttggataagctcagctgaaggctgcaaagagcagactggcccagaacgctgggtcctcactgcagggctggcctgtgcgggcaagagcttcctttgggcagcacgtaattacagaatggcttatttttcctctactgtgctgtctttaatcaccagtctggagctggtgtccctgaccagacataacaagcgggggcagatgcacacagacagctctgcaggcgccctgcctgggagtatctgccaccctctggcccatacctcccacacctggaggggagcagagcgcagcttcaaggttcctggggtagagacagcaagagagcagatgatggccaggcggggtgaggaggtcttggctgcttggaatgaggcagcaggtgtcaggacagctgccatgtggcccacgagaatcaatgaatgtccaagatcttcaggcctgaccaaaggagggacacctccctggctctctgactactcctcttagccttttctctgccttgctggaaactgtcaccttcctgagtgtggtcctcattctaggccgagcatcttcccagctgtgtacagttgcctggtccttcctctctttctccctcccagtctccatctcttgggtggacagccttccccctatgcaggccagcttttcctgccttcagtgtgtttctcacttgatcatgtctggaggcctggcccaggtatgggccattctgtcctgggaacactcacattcctctctgtggcgaggaagctcagaaggctgagcctgaggggaagacactggaggcctggggtctctgtgtgcagccgcctgtctcctagatcctcttcttccctggggtgggaggaacagacgtccatgcccacagacaggagaaggcctatggtctcctcttcctgtttctcttcctcccttacaaccctccctgaagctttccttccctccatgtcaggagctccgggaggcagtaggacaggtacaggcattcatttgccctggaccatggcctctttgggaggcctcaggatccttgccaaagggaggtgggtgcgttggagcacagtatttacccatgtgggggtgtgaggtccccgccgggagggccatttctttctgagctgaaataaccagtttatcccctctgggaagaggcggctcttatctttataatcccccaaagccactgtggagagcgggattaggtgagatttagggaagggagctggggaatcctggggccaggccccgtccctcaggccagcactgggggctccacttgagtgcctcctgtgatgccaggctgtggcagggggcagcatccctgggcccaggagccactcttacttatgggatgtgtgccctgccagggctgaggctcagttgccgaggagggggtatgtgtggagacaggcaggaaggagtaagcccagaaggccagagggcacagccagggcaggactctgggagacagaactgtgggccgcatagagggtggggagagcagtgagacgaggcagccaggggtcaccagccccacagcctgtggctgagcctcctccatggctgccccaaatccctttcctggtgcctgaggtctagggattcactcctcttgctcaggaggttttccagagggaagctcacatggatgcttcgcaggtggtcctggaaagactcacttctccttcaggcgctgcctttcatggggctcttctttgtcccagggcctcagagctggggtgtggtggctcacgcctataatcacagcactttagcaggctgaggagggaggattgcttgaggtcaggagtttaagaccagcctgggcaacatatcgaggccccatctctacaaaaaaatgcaaagggccaggcacagtggctcaggcctataatcctaacactttgggaggccaaggcgggcagattgcctgagctcaggagctcgagaccagcctgggcaacatggtgaaactcggtctctactaaaatataaaaaaaaattagccgggcgtggcagcatgtgcctgtagtcccagctgctcgggaggctgaggcaggagaatttcttgaacccaggaggcagaagttgcagtgagctgagattgcgccactgcactccagcctgggcaacagaacgagactctgtctcaaaaaagaaaaaaaaaaaagcaaagaaaattagctgagtgtagtcccagccactccataggctgaggcaggaagatcgctggagcctgagaggtgtaagctgcagcgaaccatgcccacgccactgcatccagcctgggcagcagagcaagaccctgtctcaatttaaaaatatatatatatgtatgtatgtatgtatgtatgtatgtatgtatgtatgtatgtataacctggaattcccttcatccccagaaattttggttcagtaggtccggagtggagcctagacatccaccacatttttaaaagctgtggtgtctaagattttgggctgacagtcccgattaaggtgaagccttgactaagctgcggaatgcctcgggttgttcctgttgctgtttcattgggatcattgcattcattcattcattcatttattcattcattcattcagcaagtattcactgagcttgtgtgtgccatgcactgtctcagcagttggatggtgagggtgtgtggaaatggaagaattcagagcctgtttttaaggaatttgcagtctggcgggagagccagctgtgtcaatctgtgattacagttctgtaaggtgcaggctgcaggccaggttgcccaggacaccattgacatgtaaacctcccctgaagtgcagccctgggttttgggaaaatgtcccagaggaggtgatgtttgagctgagtcttgaaggagaagcaagagttgactggggtggggcacgtgattctcgctgggaaacacatcaagtatgtgaacatgagctgaaggggctcggctcgtgtcaggaggagcaggaaaggaggccagggaggctggcacatctgaagggtctccaggagcacacacaagaatcggacttgattttaagggtaaataggtcatttgaccaaccaggcaggccctgctctggccaaggtgttccagtgggtttggaaaagttagagacagtgtggggtggagtttgggcaagcataaggccagggtcaagaatgttctagaggtgattgggtgagacagtcactgtgagaggaaaggtgactctggcagtagagccaggtggcaagttcaagtttttttcttttctttttttttttttttgagacagagtctagctctgtcacccaggctggagtgcagtggcgtgatcttggctcactgcaacctctgcctcccggttcaagtgattctcatgcctcagccacccaagcagctgggattacatgcatgcaccaccatgcccagctaatttttgtatttttagtagggatggggtttcaccatgttggcctggccaggctggtctcaaatgcctgacctcaagtagtgcacccatctcagcttcccaaagtgctgggattacaggcgtgagttcggcccgagttcaggtttttggacacattgactcctaggtccctgtgaagcagctgtaggcccgttcagcagacgggtccacattcagggtagcggtcagacttgaagtaaaataggagttgtaggcttgttggtggcaggtgactctgtgactgtggatgaggttgctctggaaacctacagaggttggtaacgtgtcctaggtggcctatggggtagacggatggggaagaacagtcagagtcaacggagaaaacaggagagaagccaggaatgggggagtcctgacagggaaaggctgggccacaaggtcgcctaagatgatgtggttggtccctgcgtcgtcggggcctacactgtccacaccttgtcccattcatccttggtgagatgggagtgtgcctctgcacagtcctgccctgggaatagctgcctttttttctgttatgtccttcctaatgtttcagtgttacaatatcctctctttcatgaaatggtagttatagaagatggtgggttttttccctccctgcccctttcttccgtccctccctccctccctcccaacctccctccctccctgacagagctggaaggtttttttccttcatgtctttcctaggaacagtgaaatgctagcatctcttttttgttgttgtttttttgagacagggtctcattttgtcatttaggctggagtgcagtggcacaatcacagctcactacgaccttgacctcctgagcccaagcaatcctcctgcctcagcctcctgagtagctgggtgcatgccactatgcccagctaattttttctttctgattttttgtacagatggggttcctctatgttgcccagactagtctttaactcttaggttcgagtgatccacctgcctccacctcccaaagtgctgggattacaggtgtgagccaccacgcctggccaaaagatagcatctctatgttagtttccctctctccatttaaaaaaagatatattttaggccaggcacagtggctcacgccagtcatcccagcactttgggaggccaaggcgggcagatcacttgaggtcaggagttcaagaccagcctggccaacatgatgaaacctcgtctccactaaaagtacaaaaaattagcccgacatggtggtgtgtgcctgtaatcccagctactcgggaggctgaggcgggagaatcaccagaacccgggaggcagaggttgcagtgagccgagatcgtgccactgcactccagcctaggagactaagcaagactctatctaaaaaaaaaaaaaaaaattgtccatgcaatcaaagactggcccccttgcaataaattgggagatcagtggtgagcacagcctgggtgggcagggagctcgccaggggcagtggggaaagtgagttggggaacatggaataaaagaaaaagttgttttgttttttaatttggctgtaaagagtagggtaggaggctgtgcacttgaacagtttgtaatttggtggagatggacatggtcacaccttgagaggccagagctggtaggggaagagatgtgaggatcccagaggaggggaaggatgaagggccagggaaggggagggttggggcccgcgtgccttgcatagccttggcctggcagtgacgcccagcgcctcctgcttgcctgcagggcgagcctccctcagccctgggcctgtccacgcggaaggccctcagcgtcctgaaggagcagctggaggcagtgctggaaggacatctcagggagcggaagaagtgtctgacgtggaaggtgaagcttcttctcggggctaccagggcctggctgggatggcagggaagtgtgggaggccccttctcaggactctgatgtaccctgtcaccctggacagtgtgacccaactgaggcctcatgaaatatcagaaagaagccaaggttcccctcagagtggctcctgagcctgcttgctgcaggagcccaacaggctggagcccagccgaggtcaaagagaggggaccaaggcggccatgggggctgggaagggtgccgggggaggcagccagattggagtgggacaggcctctcattgtcccctccctgtccgaacttcccaggaggtgtggagaagcagcttcctccaccacagtaaccgctgctcctgcttccactggccgggggcctcactcatgctactggccgtgctgctgctgctgggctgctgcgggggacagccagccgggaggtgtgcgcccaggggctgctccccaacctctccagctgtgctgtccatcctgccgcggcacctgggacagaccagggctcttgggggctgtcacccccaagctgctcctgggatgtaagggaacctcctcagtcccttgaatggggtcagaggcctagctggtgtcagggcaccagaacgggacagtctttccacaagggactggggtgggaaggggagctgtggcctgggggctgctgggtgggcgagccctcactccctgtgggtgcggcctctctttcctcccaccagccgtggggtggggctggtgaatgcctcggccttgttcctgttactgcttctcaaccttgtgctcatcgggcggcaagaccggctgaagcgtcgggaggtagagcggaggctgcgagggatcattgaccaaatccaaggtgaggtcaagggcaggcatattggtgggaaaagatgaccggacatatcagagccctgagggctcccctcctgcaccccagcacagacgggttgcctgtggccagcattgcaggggctcttgtcatctggggagttagaaggatgcccactctcttttgagcagggcagtgagagctgtgggatggtggtgggtgcccaggcagagggctgggcaggcaggaaggccaacagtggcaggtgggcttgcaggctggctcacgttgggaaaccaacagggaagtcctctcacatggcaggaggatgattgaagttttctcgttcaagtccatcttgtctggtgtactgtgctgggagacatgggaaggtgggcagacatacctgcaggaattggggtggggtaggggccgggagcctgagatggagcagcccagctccaaaagggaggggagtggcttggatttctgcttggcctttcattcaggcggtgtttatgaagcttggctgcggattgagggttgttgaggctcttttgagggacggtggctcctgctgtccaggggcatgtggtgctgtgggagaagcagcacccactcatgagacctttctccaacagacctgggcagtggacgtttagatgctaagtgagtttgtcctttcgttctgagatggttaattgccaccatgtgccaggcactgggagtgcaatggtgatggcaaaagatgggccctgctttccggagcttagtctcctgcccaggagcatcagtggctcccttttgcttatggaagccatcccagaggcacgagtggcctcccagagcctccaacacaggctcaccttcctctccagcctcttctcttcctcctcattctgatgctgaaactactcaccagtcctaggcccactgtgtatcagcctctgcctctgtgcctctctccactgttctctgctggtgagcttctccctcactcatctccagctgacaaaaccattcttccaggcccatccccagtgcttcctctttcaggaagccacctctgatcgccccagcaaatcggtttgctccctcttctggactcctgcagcacagggatctttgttaatgcttagccgtgtttgccttgtttggcgttatctgtccacatgtctcatctgccccactgggttgtggctccttgaggagctatgttgttgtctccaccttgcacccctcacaggccctctgcaatgtttgtgaagtgtatctgaatgggatgggggtacaaagaacgagagctccaggtgttgagaggaggtagaggctctggggctggagtggccgggtagggctttataagggaggcatccttgaaagcagggaagtgttggaacgagtggaggggtttgacgcagacctcctgggagaggaagtgggcagacagtgcttccggaagtgctgctgtatctgactggggggcagggccgtggctgagagggttgtttccctctttccattcccctcagatgccctcagggatggcagggagatccagtggcccagtgccatgtatccagacctccacatgccttttgcgccatcctggtccttgcactgggcctacagagacggacacctggtcaacctgccagtcagcctgctggttgaaggagacatcatagctttgaggcctggccaggaatcgtttgcttctctgagggggatcaaggtagcttgaggctttccttctcccttggaaatgcggtgggaacatccacaggcaacgatgggagggtccccagacttcatccggaagcttcccggccagcttactggctttttggcagaggctctggaacatcttcctccaccctgctgttcttttttttgaaacagggtctcaccctgtcgcccaggctggagtgcagtggcacgatctcaactcactgaagcctctgcctcctgggttcaagcgattctcccacctcagcctccccagtagctgggattacaggcacatgccaccacacctcaactggcttattttttattttttggtagagatggggtttcggcatgttggccaggctggtttcgaactcctgacctcaggtgatccacctgccttggcctcccaaagtgctggaattacaggtgtgagccaccacgcctggccccctgtgctgttctttattctcgctaaaagtctagtcccacaggccctgtcccagtggactctgggctaactgatggctcctaaccccagcgaatgtctgtacttagatgaattgtccaggaagagtggcctctgataggaccctctcgttcccactctcccacttgctgccggcaggatgacgagcacatcgtcctggagccgggagacctcttcccccccttctcccctccaccctcaccccggggagaagtggagagagggccacagagcccccagcagcaccggcttttccgtgtccttgagacccctgtgattgacaacatcaggtaggggtgctgccccgcctcctcctgtccctggtgtcttctgtgaagaggggaatgggactgacaaggaaggggccccgttcatctcgaggttctcttgagggcaggcatctccttaggctcctgtccttaacatcttgtgagaattcttagactgagtggtgccctctcccagtctctactctgaggggacagctctggaggtgaacacgggctagggccagggcagagcgtggaactgcaggactcacggtgcttgaagaagcggtatctggcagagaggcccagaatcctcccaaggtgtaggtttctagcctctctgccaagtgagactgacagtcacttctttctgcagatggtgcctggacatggccctgtcccgaccagtcactgccctggacaatgagcggttcacagtgcagtcggtgatgctacactatgctgtgcccgtggtcctggtgcgtgtggcggggctgtgcggggctgcatggggcagaggagagggctggacacgggggggtctcagggccactcacatgagcgggagtgaatgcagagggtcccagagtgagccagcctgtggagtagcaaaggaaggggaacggcagtgcctgggtccctctagaggggcggggtcaaggctgtgcctctgctgttcccaacaggccggcttcctcatcaccaatgccctgcgcttcatcttcagtgccccgggggtcacttcctggcagtacaccctcctccagctccaggcaaggaccaccctgtcctctctgtcatgcttccctccgacccgcagggctggctcttctcctagtaccctggctgtccctccctctctgcagcccagaggtcccctcacgcttcagcttaagaacacctctttccagctgggcgtggggactcaggcctgtaatccaagcactttgggaggccacggcaggcagatcatgaggtcaagagatcgagaccatcctggccaatatggtgaaaccccgtctctactaagaatataaaaattagctgggcgtggtggcacgtgcctgtggtcccagccattcaggtggctgaggtgggagaatcccttgaacctgggaggtggaggttgcagtgagccgagatcacgccactgccctccagcctggcgacggagcaagactccgtctcaaaaaaaaaaaaaaagaacacctctttcccttcctgcccctgagagagctggcccttcctgcccagggaatggccgtggggccagggcagcccttcccttccctcctccccaggcccggagctcaggagccatctgtgtggtccgctccttcccaggtgaatggcgtcctgcccatcctccccctgctctttccagtcctctgggttctggcaactgcctgtggagaggcccgtgtcctggcccagatgagcaaggcctcacccagctccctggtaggtttttccaaggtgtctgggggaagtcacaggaacaaaaagagggagctggctgtgccagaggacgggggcagaagtccagccccaccttgggctcggcatgttggtcagcctgggcagctctccaggcctcgggccctctccattccagaagggcctccaggccaggccctgggtgtgagtgagcgtctgccctggcttccaccaggtggggagtcagaacggcctgggccctttaccaaaggggttgggagccccgctggtgtgggccccccctctgccagcttggagaggcctgtgtgaaggcggcgttttcctcactgaggacctcaccctctctccgtgcagctggctaagttctcagaggatactctcagcagctatacggaggctgtctcctctcaggtacaacactgacccgggatggcttctctcgcaggtccctagagccataaccctgggactcccctatttatggccttaaagcctccaaccaggctcttagagccccatgtccacccgttacatgtggacataacctggacctgttcccataacgtgtccacaccctgtcccagagaagtgcctctccaccccaacttcgtggtgctcccctggattttcccctagaggccgtctccagggaaatgaggctgagccctaaatggccttgcagacttcctctctcccaccaggaaatgctgcgctgcatttggggccacttcctgagggtgctcggggggacatcgccaacgctgagccacagttccagcctgctgcacagcctgggctctgtcacggtgagggtgggccttgcggggaggaggcaactgtcatgcccgccctgctctctggctgggcctgggctgcccacctgccgcttgagtggcccctgggcaggataggctaatgccaggcccctttcctatctcaaatgctttccatgcaggtcctgtgctgtgtggacaaacaggggatcctgtcatggccaaatcccagcccagagactgtactgttcttcagcgggaaggtggagccccctcacagcagccatgaggacctcaccgatggcctatccacccgctccttctgccatcccgaggtagaggaggaggtacggccggctcccatgggcccgactctgggccaggctgtttagccttggagcctggccagggagggtgaggtttcggagggcgaaggagggtttgggcaccattaggatctgcttctgggcaggtgaggtgaagacaaggcagccaggggacctagaagcatcctgcctccccaggccatgggagccactggtcctagcctgtgctcctcattctcttcagccccatgaacgagacgccctcctggctggctccctgaacaacaccctgcacctttccaatgagcaggagcgtggcgactggcctggcgaggctcccaagccccccgagccctattcacaccacaaagcgcatggccgcagcaaacacccatctggctccaacgtgagcttcagcagggacaccgagggtggtgaagaagagcccagcaaggtgacgggagggggtggcacggggcagccacaccctcggccacaggctgtcctggcctccctggccagcctggcctcacaaggtctgaaagagcaggcgtctctgccctctgtcccagcacctccaggctaggccagtggtccctgaggccctccccaagtctgctgcgaagtaggtggagcctccccctacccttccattcttgtaatcgcaatcactggtgtccctactggaaccttccaaatatacacagcccggagctccctcttagagatgttccctggccacagaagatccctcaactgtgtcctctttggtctggccacccctctttttagctcctgccagtgtcatgagatatattaatagtccatagaagcagacaggagcccaagaaggacaggaagcggatttcaggagggagcgggtggaagagggtgagcagcagctctctcctgggaagggtgcctttcaggggcaggagccctccccagccttgggaggtgggcagagccagtgctggcttccccacaccctatcccgggctgaggctctcctccacatttcccccagacccagcctgggatggagagcgacccctacgaagcagaggactttgtgtgtgactaccacctggagatgctgagcctgtcccaggaccagcagaacccctcctgcatccagtttgatgactccaactggcagctgcacctcacctccctcaaacccctgggcctcaatgtgctgctgaacctgtgtgatgccagcgtcaccgagcgcctgtgccgattctccgaccacctgtgcaacatcgccctgcaagagagccacagcgccgtgctgcccgtccatgtgccctggggcctctgcgagcttgcccgcctcattggtacaggtccccatggcaggggatggctggctggacccgcctcctagaagaggcccagtaccaactcctcacgggacttaatggacctggcagggtattgccagggcatggccctaagttcctgttccccgccctgcaggcttcactcctggggccaaggagcttttcaagcaggagaaccatctggcgctgtaccgcctccccagtgccgagacaatgaaggagacatcgctggggcggctctcctgtgtcaccaagcggcggcctcccctcagccacatgatcagcctcttcattaaagacaccaccaccagtgagccctggctacgttggccagcaccaggcgagaccttccagagcttggcaggggggctctgcccagccccacccattgctagggaggcctgggcagatgaaaagtagactgcttccaagtgttccactctggcagggctggaattggggaccagggctgggatggtgttggctgcagaggccgggattgtccaaaggatgggaatatggtgtctgcattccaagcccagtggcattgcagagccttgctgtccgtgagtcccagggagtctcctcctctggcaggggctcctcagcgcccttctccaggaggacagtgcgttgcctgtcaggtcagcgtgagggggctggttagcgacactcagggtttgaactctctcccccaggcacagagcagatgctgtcccatggcaccgctgatgtggtcttagaggcctgcacagacttctgggacggagctgacatctaccctctctcgggatctgacaggtgggtgaggaagcacatgccagcagcaagagcagtcgcgctgccggggcacctgcccttcacaggcaggaacactcacctcacctccgcctgcttccctggcagaaagaaagtgctggacttctaccagcgagcctgcctgtctgggtattgctctgccttcgcctacaagcccatgaactgcgccctgtcctctcagctcaatggcaagtgcatcgagctggtacaggtgcccggccaaagcagcatcttcaccatgtgcgagctgcccagcaccatccccatcaagcagaacgcccgccgcagcagctggagctctgacggtacctcatgggtctgtccagcggggctggtgctggggctcccctgggctgccgaagcccaggagcagggagggcgtctggagggccccggcaccccccacagcaaagggggcagtggccacagccccaggctgggacgccagtgtggcactctatccggggacatggggagtcccttagtttcctcccttatcagtgggtgctcacttggcctgcctcactggttggttgtgatgctcaagtgggttacgtgtatcagaatgctttcctgggaagttaccaagcagcgttcctagagcattaggcttagtaggatcagacaggagatcaggtctgtcaccctgctggtgcagaggggcccagaagctccaccacgccaccccattcccaccagacacgcacacttcccaggttttttgaacccaagagactgtgaattgaaacagttgctgagggtagggccagtaccccctgggcaggagctgaagccacgccttgttgtagcttccagctcagattcggctacctgactgatgcatacctttcactgtcttttctcctgtgtctgtcggctccttcgtgtgtcttggctgtgtgtggtcccctggggcccatatgctcattgatttgggtgtggcatctgtgtgtgtggccctgggctggttcctgggtgtcctgatcgggctgtgtcctgtgtgtcctgcctgaagaagggatcggggaggtgctggagaaggaagactgcatgcaggccctgagcggccagatcttcatgggcatggtgtcctcccagtaccaggcccggctggacatcgtgcgcctcattgatgggcttgtcaacgcctgcatccgctttgtctacttctctttggaggatgagctcaaaagcaaggtggggagagccatcccttctgccaccactaactctgtttccacgggcttttgggcccgtatgttcatggccgtctgcctttcacaggtgtttgcagaaaaaatgggcctggagacaggctggaactgccacatctccctcacacccaatggtgacatgcctggctccgagatccccccctccagccccagccacgcaggctccctgcatgatgacctgaatcagggtaagggcaaaggcgtggggtggggacggggtggcggtgggaggattcccctcctcagagccacagccaggaagagcctccggagagccctccagttaagtacattcccttgggaaatggctctgatgtccctgcgggaaacagtagtcagcaggaaggagtggacacaggcaaaaaattctctgcagggcaaggacaggttcccagaaggctggtcccaaggtgagggagaggcttttgtccccacagtgtcccgagatgatgcagaagggctcctcctcatggaggaggagggccactcggacctcatcagcttccagcctacggacagcgacatccccagcttcctggaggactccaaccgggtacgatggcaggatctgtctcacgtgttcctgtagtggtcccatagctggtccaggggagaggtagagaggtggtgggcaggcggtggaggggagggatgctgatccccatcccgaagccgctggcatctctgctttctccaggccaagctgccccggggtatccaccaagtgcggccccacctgcagaacattgacaacgtgcccctgctagtgccccttttcaccgactgcaccccagagagtgagtgctgtggccatgggtacttgggcaacctggtcccgtcggctgagctctgcctgggcctgcgtaccccgtgggctctggagggatgtaggtttcccatgcagggagtaaaggaacctgggctgggatcagctggggaatcttgtgggttggagtcagaagtgccgatgttcacatgatcccgctgccgggggtgggattgtttcaaagaggggcccacctcccatcgcctcctgctctcctgtcccatgggtctctgcccagtgcccacttggtgctctgcctgcctgactctggtgcccttatacgctgtcctcagccatgtgtgagatgataaagatcatgcaagagtacggggaggtgacctgctgcctgggcagctctgccaacctgcggaacagctgcctcttcctccagagcgacatcaggtcagggcgggaccctggagcctgcgggccagcctctacctcccagaccggaggatcagatgggcctgcgtggggctgggggtgtgtactatagccgacctcgccctggctgggaccaatgcacctgggcatggtgggagaagagggtggggtgcccagtcctgtgggagatacagctgaagtgtgtgtgtcccccaccctgagcagcattgccctggatcccctgtacccatcccgttgctcctgggagacctttggctacgccaccagcatcagcatggcccaggcctcggatggcctttctcccctgcagctgtcagggcagctcaacagcctgccctgttccctgacctttcgccaggaggagaccatcagcatcatccggcttatcgaacaggtgggtgcttcggcaggcaaaggaggagagacgcaggacaggacccgcctggggtgggagtagcagcaaaggacctgtttgaacccggggacctcattccccagccctccgagcgggctctcccaggcagttacattcgcctctgctcccctcgtagaagcatcctgggcgtctggctcttggctaaagtgtgtcagctgttgggcctgggagaggccaggtagacccaggccataatctgtccctcttggtccctaggctcggcatgccacctatggcatccgtaagtgcttcctcttcctgctgcagtgccagctgactcttgtggtcatccaggtgaggtggggcccgcacaggcattgcccccgtgccactcaccccttcactcaggggccagctgaaaatctgaggaaggaggctggggttagcagtacagtcaaggggtccccccagagcctctgtgaagcccctgggctttttgagctgaccctcattggcagaagagtattccctccggcccctgttccctctggcaggatgtgagcatctatctgggcccagggcaagggagctcgggggctcctatgcccttattatttgcctgaattgaactgtggctcttggcttctttcctggtctagttcctttcttgcctggtccagctgccgccactcctgagtaccaccgacatcctgtggctgtcctgcttttgctaccctctgctcaggtgagatgccatgtatcttccccacaccccatgcctaagcaggaggtgtctggatgtcactgtgcagccccaggagcccaaggttctggaactgctcaggtctcacctcctctggtacaggaggcatggagggaaccccctttgtctttttttttttttttttttttttttttgagatggagtctcgctctgtcacccaggctggagtgcaatggtgcaatctctgctcattgcaacctccgcctcccgggctcaagtgattctcctgcctcagccccctgagtagctgggattacaggcacccactatcatgcctggctaatttttgtatttttagtagagatgggtttttgccatgttggcgaggctggttttgaactcctgacctcaaatgatctgcccatctcagcctcccaaagtgctgggattacaggtgtgagccactgccgtccagcctttgttttattccatcccctcaccagactcgacctcacgcgcaagactccctagaggttccctctatgagaattgagggacagagggtcattgtcaccatccctctacctgatctctgcttttcagcatctctctgctggggaagcccccccatagctccatcatgtctatggcaacggggaaaaacctccagtccattcccaagaaggtaagcaaaacagaccctgtgagccttgcaagtgagcatggaagggactgaggattgggggaggagagaggggctaatctggaaggctctggatgggggattccagcagaactccggcacttggttcctagtcttcccccagatcaaagaggaggtagtggcacagagctgggaaagacccttgctggggcttgagctccctatccccccaggcctgaccatttactaagagcccgttgaatacgtggaagagctaggagcagccggcagaggggctgtgcgccccaggagtgactggccttgttcccgcagacccagcactacttcctgctctgcttcctgctcaagttcagcctcaccatcagctcctgcctcatctgctttggcttcacactgcagagcttctgtgacagctcccgggaccgcaacctcaccaactgctcctccgtcatgctgcccaggtgggtcccagccccagagatccacccatcgcctgcctcgcctcgaggcttcctccctccccaccccagcctacctccctgcggccctagaggggctgagcccatgcctcactttggcagcaacgacgacagggctccagcctggtttgaggactttgccaatggactgctgtcggctcagaagctcacggccgccctgattgtcctgcacactggtgagagggctccctgggagggcgtggatgatggtgggagaggagccccactgtggaagtctgacccccacatcgccccaccttccccagtcttcatttccatcacccatgtgcatcgcaccaagcccctgtggagaaagagccccttgaccaacctctggtgggccgtgacagtgcctgtggtgtgagtattgctaggatggagggcggagtgtgggctggggaggagagggccttctgcagggctaggatcggagggcgggaccggggccagtggtttaactgtaccctgcctgagctaactgttgtactgggaagagcagggaaggaagcaagcagtgtcgggttcacacggggccgccacctcctgcaggctgctgggtcaggtggtccagacggctgtggacctgcagctgtggacacacagggacagccacgtccactttggcctggaggacgtgcccctgctgacatggctcctgggctgcctgtccctggtccttgtggtggtgaccaatgagatcgtgaagctacatgagattcggtgagctgtcagcagggcgcctccctctgggctcaggcatgttccctaaacctgttactcccttggcgacactcccccacctttccgctgcccatccctccctcctcctctggtgtcctgccccggcccctggtctaaggatctttgccaacctgtactttaatctcctgccccaccagggtccgagtccgctaccagaagcgacagaagctgcagtttgaaactaagctgggcatgaactctcccttctgagccactggctgtggtggctgtagttgcccccgtccctggggctaaagccagacccatttctgaacaggggagtttgtatcatgaatgtttccaggtttgctcctgcacccgtggcactggaaacccagctccccgtgtcagaccccgctgtcttcctgagccctggggctcactgtggaggagctgacggcctgggcccttggccagtcctggctcttccctgggcctcaccagggacactcttgaatgtatggcctcaggcgctccctagaggggccctaaaccccctcacctgtgagctaccccctttagggatcccttgcccccttggagatcccttgccccccagtgcctctgctcgtgggtccctggacacggccttgaagccaaccttctttggaggagcaacagcagcagccttggccgacgcgtccaactcccaaggctgccgtggagggcaggggggtggtgcttgcctggatgtggccccgagtgcctcccctccctccctctgtgggggagtctcccgcctgaacctgaagatggagcagggcccccgcttcgccctggagcctcttcctgtgcctggctcaagctggctgcctgtcagtcttggggaatctggcccaggtctcctcagcctctgccccagttctgggagaagtttctactggtgtatattttttactggaaatgagccttttaggaatgaatgtagactggtttgtattaaaatgtgtcaattgctaagaaatacctgtggctggtctgtaaggccactccagggtctgcccacccccggcggtggctggcaaagggaggcctaaaccttcctccatctacgcgggtgggtccctcaggtctggctcaggcgagacccctagggtcaggggtccccatgtcacagaggcaaacacacagcccagtcacgtggaatggtgttttcattggtgttagttgggggaagaggttaatggttacagagccagggcctgggccaatggggtcaggctctccctgccctcaggtgggcagtcggggctcctgctgtggtccgaagcccctcccccattgtgtcctctcaggcagttgatagaataaattccatttaaaatatatgcatttctctctgcttagaaaataacatttacaattgaaaagttaggacttgtgggatctgttaaccccactgcctcccacccctgctagccctgcctcagtgagggaaggcgggggcaggagctgcctgggcaccaccgctgtgtatttacatgtcctctgtacacctacggagagggggcccggccagacacacgcctcctccagcctctcagggcctgggcaggatggtgggtggcaagaggcattcccttggcacaacttgggacatgggctggggggtacagagaaagcacccccaaagccccacccctacttcctccctgaggagagagctcttaccagggtccctgtccaggagcagggctgtcctgctcaatcgatcaaaccctgggaggggctttgctgagatgcagcggaggtccctcgctagtcaggttctaaggtgggctgccccacaagagctgtggtgcccacagccgcgggctgagtgggaaggggccctgctaggaggggcacttcagcctgaccagcccttggcccgtccctagggtggcaggggcctcttctgtgctggggcaaaggcagtggacttcggcaggtcacagtgggcactgctggagggctcagtccagcatggcgtccagctggtcagccagggcgtcgaacatggtgctgatgtcatccagaatgtgcttggtggaggcgctgggggtgctgcagcaaggggaaggatgcggtcagatcagccagtggcctgcaccccactggccctggggcagggagctgtcatagctcccagaggctcagggaggcaagggaccggccaggctcctgtgcctcttaaatggtagccaccaggattccctgatctaggtgatttcaacacctggcctcttatcccgttagtgcctgcaatgtccccctccaacatccccatgatccctgggcagaggatgcagggagcactgtttctctgcagccttctctccctccccatccggcccccctcacccctcttgctccttggtgccaatgctcttctctgcggctctcagtgcagctgccagggacgagctggtctgctccagtctctgctgggcctggcctgggcccacagtcccagtgctctcaggccgtggaggaggcactgggcgggggccgagccggggcgctagcttagggccagaaaatgccagctgggtgcaggccaccgacacaggcttgggggctgttcctgcagagacaaaaaggttggcttgggacttggctgggtcagacacaaccctgccagcagtgactctcccacaggcctcccctcttacctgctccgggcaccttgaggagggcagcaggggcggccgggggttctgtctccccattccaccgactagctgctgagctttccagacctggccctgggcagggcggcactggaggctgcatggcggggctgggagcaaggggggttggaactccttgggctggaaggctgctgggctcgggctggggaaggctagaagctggaggagactcgccaggagttggggaaggcagtggggcagcggggccaggcgtggcactggccactccgaaggccagcagtgcggtctgcagtggctctctctcccggcacttgggcctccgcttaacagtgtctgattccgtgaggttgaaatcgaggccggggggcacgggtgtctctcggggcggggggccagcgggcttcgggcgctgtttgatggtcaggttcccttcctctgcaaacggcagcccttccccagagctgccccgagatgggggcgtcccctcagggcctggctcctcctcctccgtgtctgacgcgggcccagccggggcaggtgggccagggggctctgaggggccagcaggttcactcagtgttcgccttcggggccctgtggccccttccttgggccctgggctctcatctagtggaggtggctccgggctggggccagagacggagctgaggcgcttggggggcgggggcggggggcctttgcgccgggcccgcagggcaaaggactggctgcgaggagtcccccgagctggggttggggtcacactaggactggtccggacaagggcactgcgtcctggccgccgggtaagggtagcataactgcctagggtgctgcccactggcccttcggcctccccctcagcatccccctctgtggggccagggcggcttaggctgtgggaccggcgcttaggtcgaggcgggtctgggggagtggcagggggcccggccaagtaggagaaggcccagggtgcgccaggaggtggccctggggccgggctagagggtgagccctgggggtacataaaaacatagggtgggggtccttggccaggaagtgaagaacaaagcttagggggccgctctgtgccctctgggaggttcctctcctggggggggctgggatctccaccgctgggctgtggggcaggctgttcctgtgagtggccagacccccgtgagcgtgccccgatgctctcctggctgggagagcgggcaggtgggagggggagtggttcagggccaccccctgccatggccgcctgtagctctgggcttagttcgctgccctggaaggtgaggagccgtgggccagctgtagctgggccttctccgttctccagtccctcgatggccatcagctccggacccttggccagccggcgcccgccttcgctgagggcctccccctgcagcaggccccgccgaagctccgccagccgcttcacccccagcatgagcttcttctgatgccctgagatgggggacggaagtggcaaggttagctggggctggggttgtcctggtcaccgctgggccccatactgtcttctcttggagaccccggaggcaggtgggggcccagccaggcctcaggacagtccttaccgagcttgttgaccccaatctcctgcagctcctcccaggtgaggtcggccaccagccccatggagtcgtagccgctgctcaccagctgcttgtggtactgtggcagccccagtgcacacagccactccagcaggtccgtctggaagagcaccgtcctcagaacaactcccagccagcctccgcccccagccagaggagaaaaggcaccgcaaagccacagctgagggtgacagcacgtgccccactccccagccacccttgatggctcactgggatgtagctgggcagccactcggcgatgctgagctgagcgatctctgaggcgatcttcttcctgtgcccaggcttggtcaccccgatggccgtcaggtcctgccacacaaagtctggccatcaggcccctcccccgcctgctgggccctcccccgcccgctgggtgctgcttcccggctgcagcacccacctcaggtgtcatgcggctgatggtaggcacatcatagccggcctgcagaaagtgggcagtgtagccctccagctggaactcgcttagccagttatgaatggcctgcgcgtcctgcggggtgggggaagggggcagaattagcaggagctggaccaaggccctagcccccaccaggggctcaggacctgcctgagcggggcttcagtccatacagaggctcttgcctctaccctgccctacccaccccgaggcccacagtgcaccccgtggaggtcacaccttcccccccgaggcccacggtgcaccccgtggaggtcacaccttcccccccgaggcccacggtgcaccccgtggaggtcacaccttcccctccagcagctgttctggccgcacgtcctgggtgaagatctgctccccagagcggcagttggccagagggcggtggctcaggttgtcttcaaggagagagaaaaatggaatggaaaggtggcaggaggaaggggtgcccaccctcggcctccttacttgcacctctcctagccaacccaggtcccctgacccttcctacctgccagggacggcgggtggagtcctggcagcacctggtcctctccagcagagggcagtggctggaggagacagggcaggagccaactcagcatttggggaactggcagtggggagtgagccctgacctggtccgtgaccccatcatcctacctgggcgttctcaatcaggaggccagggccatggccattagtgccctcagagctctgcccgctgccggcactgcggatgctgcccacgctgccctcactgcccacactattcctgtcacctgctgtggggggcagaagccaaggggtcagagtcccaagtgtcgctctgacagctgtctggcagcttgcccaggccacacgcccacacagtgcccagcactgccccctgggaggatgtacctgggctgtctgggctgaggcccacccgaggaagctggctgtaggtaagagggtgcgggggttcttcggcaggaggctgcggtgtccgggagaagcctgggcgcaggggggtgggtgcggaggggaggcgggctgcagggatgcccacccgcttgctgaccacctcgacaatgcccggggggaagtagcctatgcggtctgtgcccctctggctctcgtggatgtggcccttccagcggccgtcgggatgctgttctagcacctgcggccaggggtggggggcggggacggtcactcccagcaccaggcaagtggcaaacggttgtccctgcagctgcggtccggcaaccctggtccagctctttccctacccctaaggagctggcctctgatgcccacactggcccaagttccgcccctgctgccagcagccagctcaatctcccctgtgcctccagggcgagccccagtggcagcccgtggtcaaatcacagctccactacttgctagctgtgtgaccttgggcaagtcacttgaatttctcttgattttattttgtttaattctcaattttgtcatctgtaaagaagaaatgctaacagcactgccttccctggctttaagaagaattaaatgagggtgcatatagagacctcagagcagaacgtggtaacatagcaggtgcccaaataagtaacagcaatcatttgtatttgcaaaggaatgcctgcttggggtccctcaccgtgatgacatcccctgcccggacattgagagcagtgggatcgtggaggttccagaaatccttgagcgctcggaccttcaggatccctgaggcctctaagaaaacggggtgggggacaggtgtcatctaagggtccttagggcatcttcccacccctcatgcccttgacaaccctcccccagggacgtccactccccctccacatcctggtaccacttgagcggccccaggccccctgggcagggtatcctcccccgcactcaccccgcagtagctgcttgatttcccggctggcctgggaggtggtgaactgattcactatgtccagcgccgtctggttatacgtattccggatgttcacgtccacacctccctgggtgcacagtgtcacatgagcacacgctaagcactttgacacccctcacccgattctctcagctacccgggacataggtactattaccattttccgattttacagatgaggacatagaggctcagggactcagtcaaggacaagctcaagttcactcagctagtaagaggcagatctggggtgccaatcaggttggtctgcccccgatccatctgcaccgcctcggcaccattcagaaggaagtcaggcctctttcctgacgcccatgcaaaaaccacgctggagtcctccgtcccgtacctccccagccagtcaggggcacagggcagaggctccatggacacctgcgagggagcaggggcccatacccacctccagaagcagccgcaccacctcggtcttgccatacagtgcggcctcgtggagcgccgtacccgtcttggtctggcggttgatctcgatcccagctctcaggagctgcctgcagtggacggggggagtcacgggggaggtggcgtaggagggggtgctgactgctgggggcctgggagatggagagcccgggtgaaaagggcagtgggggagagcactgaggggcaccgatggtcccgcaggcaggtgatgaggaagcgaggggaccccaagggtacctgatgacttctctgtggccattcttggcagccaagtgcaggggcgtggtgtagttggggtcacacgggtctttggcctcaccctccagcagtgccacacataagtggctgttcagaagcagctgggccacctgcagcacccagtgcccagttagagcctcctcctgagaccctgtagatgtccaggacccagcaccccaaggctgcaggcctcaccttgagtcggccaaattcacaggccaggtccaggggcgtcttcttggccttgttgaccaggcatgggttggactgatgctggaggagcatttctgactggggttgggggagccgagtgagggggcctggcctgtccggcaccccaccctgccctgcgccacgcccctgtgggcagcctcacgtaccacctcataatgtccatactgtgcagccaggtgcagggggatctgtccgtccagcgaggcggcattgacagccgcagaggcgcgcagcagcagcctcacaggctccagccggccctgccaggctgcgtagtgcagcgggcgcatgcctggcaggaggaaagggtttctgagggaggtcctgggacggcgttgggggtggagaggaactgagcagagtacggagccagcccagctgggagggcagagagcccacggggatgcaatgctggctctatccaggtgtgcttaggaagaggttcggctcgacagggctgaagccagagtcctgctgtgcccactgtggatcatgatgaccccaggacagcaacaacacctcgctgagcctcaacctactcatctgaataatgggatgttagtaccactcgcctatgcaagaaggctgtgaagagtaaacggggaaaagccacttgcaagcccagagacgctgtgctagcatctattagcattgctacgttgtcataggagcaagctctggtcccagggtctgggtagggcccctacctgcccagggtgggggtcgggggcacatgggggtctcaccattgctgtccttgatgtcaacagtggcctgagcctctagcagcaaggctatgagctccaggctgccccccaaagcagcgtggtggagggcagagaatctgatgtgggaggacacaaagttaggggtgttggtgggcagcccccacccccaaatcctggtcttccatacccgaacctatcctgggggctggcagggatgggttactggcccccccaaccccagcagccctgccgtgggagcgcagtggctgagccacagcatgaaagggctcagtgtctgcactgagaggcccgtttgtctcgcccccccgcctcccagctggcccaggggagggggccgtgggagcaggagcctgagggctcctaccctccagggagaaaagggggccccaaaggaatctgaccccaggaggccctgcggagaggcaccagggcccctcccctcactcagggctaactccacgggcgggcgggtgccccctccctccagcccagggacagggcccacagctcgcagcaaatacacttccagggccaagtctgagagggaaagggaccctgggcctcaggatctttccctccagccccacccctggggctctactgcccccacccagcagctctgcagagggacaggggctcccactcacccatcagcatcctggtagttcacgttgagcctctttgtggagcccaggagctctaggggtcaggataggaggtgtcagggccatcagatgactgccctcactcagcatccctccccccacctgtcacagcccggctgacctcttggcgtgcaggaaagcacctgccccatggccttccgcctgtcccgtccctgtggctccccaccctggcccaccggcccagcagcatgagggcagtgagggcaggatgctgctgcggcagtgggctggcttcccctcgccccagtcccgcttgtttatagagccaaagagggcggggggtgggactggcacgatgtgccctcagtggacaggcccacggtgtgcatggttagcattcctgcctgaatgggccaggcagcgagtcatgttgtcctactgggccgaggggtggggagagagaaggaaagaggcactaggtattcaagggcaggccacgatgcccagtcctggggcatcccagaggaaggtgacattagacagacctctacccaacactggctctgccaggcaccagctgtgtgactgtgacaagtcatttaacctcccatgctcagtgtcctcaactgtaaaatgagctgatcagaacctgctcacgggggctgtgagtacagtgcctgaccttgtcatatgcaaagacaggagctctcaacatctagccctcctgacatgtgggcaaataccatcccgatgttagggcgatggtcctccaacaagagctggcacagggcccatactgtccccactgggatctccatgggtgctcagactgcccggggagtcactgctactgctgactccacacctccagggtcttggctgagatgtccatgccctggacaaggactctgcaggttggtggcaagaggagctggggccaccccctctcggggcagggttcaggcaggtgtgctccctgcgagagccagggaactggtgggagtggctcttgaagtgctggggagggaaggaaggcctgtcatgggtggcccctgcctcctgctagaacccaccctgcagggaaggagtgggcctggcttggccaggctgggcagagtgccaagtgtgctggcccaggcctgccccccaggctctggtggacccctgaataccccagtagcctggggaagacagggcttcattccaacagggaggggagggaccaacctggcagtagggaacatggcacagggagggaggggacagctacattgagggccaaactgaaggacactgtgccacaaaggtaaagacagagccagggagggacaaagcgctaaaggggttgtggccactgggaagaaacacagacctccattttcctccagtccccttggaaagtccttgtcatacagaaccatttgaggcagtagaaagaagaggggctctagaagcggaagtgcacagttcaaatgctcactctggctgtgtgaccctggcctgccacggtacctctctgagccccagtggagacaatgcggtcagcagggaagagacacagagcacccttcaagctgcccactcttccattagccctcctcttccaacagcctggacagtttgggatgaggcagctgggtggcgggatgcagtccctcccgagaggagcaggacaatgtgacaggcaggacaggaacagggcaagggccaggctgggtggctccgttcttttcagaacaatagccggaaaggcggtggggaagaggctcagagtgaccgggctggggaccctggcaggagggcagagggtccaggttcctggcagtgactccaggcacttcccctgcggtacaaccttcttcccgggcctggcgctgggggtggaagggtggctcctgatttaggctcccgggcagaggatgtgagctcagccggccgccccagcacaccccatttcctctggccaaagaaggagattgttcagaaaagggagtggtgcggcgaggggcggggagcagggccagggcaactgtacccctcttctctcagccacctgctccctgaagaggacccgggtgggggcagggaattggcctgatatcaaatgcaggaggctgagggagcatctcccacctccctgttctctctctggatagctataaagcgccagctaaaccccagaagaaaaaaggggagtcctgacgcctcccttttagcagtttcccttgccttcttacgatatggagcaagagtccccagcctcacttctgagaactgcagtaaaatcatggggagaactttctgatacacagagtcccaggccctctgtgatgagtctgattttgaggggagtccaaggagtctacacttttatttttacttatttattactttttgagacagggtcttgctctgctgcccaggttggagtgtagtggcacgatctcggctcactgcagccttgacctccccgactcaagcgatcctcccacctcagcctcctgaataggcgggactacaggcatgtgccaccatgcccagatcatttcttaatttttttgtagagatggcatcttactatgttgcccaggccagtctcaaactcctaggctaactaggagtcctgggggactccttcctgtgcacagggccaacaggactataggtgtgtgccatcatggctggcccagtctgcacttttgaaacaatccctaggccagcatggtggcattgcctgtagtaccagccactcaggaggctgaggtgggaagatgaggcaggaggatcactagagcccaggagttcaaggctgggcaacatagcgagaccccatctctttccctgtcctttttttttttttttttttgagacagactcttgctctgttgcccaggctggagtgcagtggtacaatctcagctcactgcaacctctgcctcccaggttcaagcgatcctcctgcctcatcctcctgagtagctgggactacaggcacttgccaccacactgagctaatttttgtatttttagtagagacggggcttcaccacgttgcccaggctggtctcgaactcctgacgtcaagtgatctgcccacctcggcctcccaaagtgagaccctatctctttaaaaagaaaagaacagaacaatccctaggtaatactgatgggcagctgagtgcagagcacaggggacagggtgcagctttgcctctgctctgccatgctatggctgtgtgactttaggcaagtcactaaccctctctgagcatcactttccttatctacagaacggatattgaaatacctatctcacaggcaagtgaggaaattataatatttcatacactataaggtttgcaaatgtcaccttgtgatctcacttttgtcaccagcctctccagcttctcagaggactgggaggggaggcacagtgccagggcctcataaggaatcccaggccccagtcatgctgtgcctgagcctacagcctgcgcagggtgaattctccactttgggactgagggaagggacctccttccccacagacgcttcccactgggcacaagggaacttctcggagcctaagagcccagctctgcagttcccgccactggcctccaaacccctcccgcctgccctcctgagggcctcactttgaggacccagagcggtgaggccagcagcagcttgaccaaggccccactgggcaggttgccaaaaacaacacagaggtgacagaagaggggagtggctgcactgctggaccttagggccctcccctgggacctccttagcacctccccagtggcacccaccctgtgtccacttccctaggcacagagaccaccccacagctccacctctccaggccctgcgtctcctgccccagtgtgctagtggatgcatgaggttaaggcccttcctctggcacccataccccaggtgttcaggtagcctgggggactccttcctgtgcacaggaccgaggtgtatcttggggctagagcccctgaactccagaggagaccttcccatccagggaactcctcctgcctcagtctggtggcaggaaccacctcctgcctatgctgatctgggatctcaaggtgacaagtccagcggcctcctgggacagcccagagagccctccctgaagcccagaggtctattctccctgtggggggtcgcaccacagaggtacccaagacatggggctcaggtgtggccgcttgtgcatggatcccccacagcccggtcaggtctcgaggctaggtgaaaatctccagtaaatgagctctggccacaccccaccaggacacacatgtcaggggaagagaaactttagcaacttgttagagagtgttgaactttttttaagcagtagaattccctttttaaaagctatctcgtggcctggtgcggtggctcatgcctgcaatcctagcactttgggaggctgaagcgggtggatcacctgaggtcaggagttcgagaccagcctgacctagatggtgaaaccccgtctctagtaaaaattagccaggcgttgtgtcaggcacctgtaatcccagctactcgggaggctgaggcagaagaatagcttgaacccgggaggcagaggctgcagtgcgctgagatcatgccactgcactccaggccgggtgagaaagcaagactccgtctcaaaaaaaaaaaacagctatcttatagatatcctcttaagacacgaacatagaggtgctctggttgaaatgtgtgcgtttgaggttgggggtagggatgaagttctatctattcagtcttctctaacccactgtcagaaatctcatggctccaaagaacacatcagaaagaccatctgctagaaggcaactccacgaagacaggaatttgggtctgttttgttcactactatgatccagtgcttagaacagagcctgagccaggcacagtgactcacgcctgtaatcctagtactaggaggcctacctaggtgggtggatcacttgaggtctggagttcgagaccagtctggtcaacatggtgaaacccccatctctaccaaaaatataaaaaaaaattagccgggcatggtggcacacacctgtaatcccagctactagggaggctgaggcaggagaatggcttgaacccagaaggcggaggttcccgtgagccgagatcctgccactgtactccagcctgggtgacaagctataggcactcaataacaatgtgaatgaacgtacttcaaccctctaattttgcaggccaggaaactgcagcccagagaggttaagtgacttgcctaaggacacacagcaagggggacccaactttctctctggctctctcacacagaggcacttcttactgagaacaagacagtccaccctcctcaaatatgcagatcacagtgacccacccccacccaccaagcctctgtgaactgagcgctcggcctcagcgggatgctcgtcccacccggtactcacttgtctttgtggccttgaccttcgccaccagtttctgcacaccggtcacatctccattcttgacggcgaggatcaggtcctgttcacgacccatactggctcctgggctgagctctacactcaggagtccagggcaaaggcaggcaacgggtccaagctggggcgtcagggcgccatgccacagccccttggagggctcccggttccgggggagcaagtcaggtgtcccaggcagtgggctcctcgtcaggtactgagggatactcccaaaggtgctccgtgaactgccaccacacgaaggaaagctaatctttgagggggtgaaggctacatggaaatctggatggatatcagcttgtggcttccgacagctccaggatgggctgggactgggcacaccaatcttcccggcttggctgtggaacaccagtgcccacccagagagcagccagcattcccttgggcctcaggcagcagcggtgcactggtctcagggctctggaaaaagcacggggcctctgtcgaatgctgggccacagcctgcaagggtcccagaagtggagtgcagaggatgagcaggacaagacctccagggagcccccaagccaccctggctcccctcggagtcgatggtgatgctgagccactgaaagtggggaggaagctgctatgcatgagaggagtattggtgggggggaggtggcattctgggagggggaggctgagtcactggggccccagggcacctggcagtacctcaaccttgggcaggaggggccctggcagcatgacatactggggcaggccgggccagcagcctgttctccacagcccgaggctccgacacccacagacaactggcgggccaggaggtggggccgggagggtcaggcacaggcaggcgggcaggggtcactccctgtcaaaggcaccagcccccagattcctccctacggaggcttcaaggcttcgctttaatggctggatgccctagtcctaggactctttgtgaacggagagcatgaagtgcttctggccccccatttctgggggctctgcctgctagagagggaagctgcacagcacctgttgctgacccgccctcgccccttgtgtcgggtggaggagcagctgggcagagaacagagagagctggggcactgctgacaaacggggctcccaagccccccaagcctgaacctgaagcccagaccctggactccaccgcagagaagcttacgtcagtttctcggtggcagcgaatttactgccagagtcttgtggcatgagatccgcgcaggcctggggccctggccgggaacccctcactccccaaacgtcccaagcccaacccaggggcactcccacgcggagcccgcggccgacacgggcggagggcgcccttggcagtgcctggggtcgggctggctcccccgccccccggaatgtccctccagcgcctcgcaaccccccagcccagcccagcccagcccaggcccaccggggaacaaagcggcgggagaagccgggcgggccaagcgcccgaggtataaacgcggaggatggaaaaaggggcgcgaggaggacggaaggagcggggagatggaggtgcccgccgaccccgcaagaaaagttagtttgcgcccgcccccaggggcgctgacccccagcgcgggccccgcagcctcacctctcccggccgcccgccggggtccggctggccctgctcggtccctggcactcaggacggtggctcccactcccccctgcccccctttctccttctccttttccaaggccggctcggcgcctcccgcaggaaatcccgcccctcccccctccctcccgccggatcgggaacggagggaccgtcccggccgcgcagtcaggctgtcagtcagcaccggcggctccgcccccatccgcgccagatcccgccccaactcgtgcccgcccggaccgggggcgctgaccggatcagcgcatgcgcccaggtgaaacggaggggcggggggcgcgggggcagaggtgacctggggctctggacttagacccaagggctagacaccccgggtctgactggtgggagagaagacgtaatgtgaagggggttggcaaccaagacgcgggaccccacttgcagtaccccccgtctgcggccggcgtcgcccacccgcagccgccggccgggcaatggcaccacctagcggacggcaccagtgcggggaccccagcctcgaggaggcgctcgtgccgggcggaggtggcgcttcagcaccgtcgtgggccggacagcgcctcccgcccccggccctcgaaacctggcttcggagcccagccgtagggaccggacggaagacaccgaaggaatggcgaacctccccggaccgctcctgacagttcccgggtggccttcggcctgcaaagtcggaatttgcacaccctccgctcgtccttccctgagcccttctgccctccttgcccagcccgggcggtggggactaagcagcgcgaggctgcagaggggcggtcacaagtgtgaccattcgcactgcactccagacgccggctcctcaggctttactggagagaagccccgaggagggctaggggcaaaagaggggccttctgcatctccagcaacctgcgggctgagctcccagacccggcgtcggggtgcgcttccgggcgggcgctaggaccggggacaatcaggagggcgcagagcgggctggggcggtgcagggggcggggctgccgcggcattgcggatcggcgggcactagggcagcgcggagctccggcggtgggcggggcgtggcggcgcgcgcagcggcaggcggcggcgggatggagcccgagcccgagcccgcggccgtggaggttcccgcggggcgcgtgctcaggtgcggcgcggcccggccggagtgggtgtcgggggcgcggggccagcgcgggtagggaaaccggcgcccgggacccggccaggcggcccccgatgcgcggcgctgaccccgcgtccccttctcccccagcgcccgggagctcttcgccgcccgctcgcggtcgcagaagctgccccagcgctcgcatggccccaaggactttctgcccgacggctcggcagctcaggccgagcggctgcgccggtgccgggaagagctctggcagctgctggcagagcagcgcgtggagcgcctgtgagaggggcgggcccaggggtaagggaagcgggggcgaggcgggccgcggggtctccggaatggactgacgcagacccctccccactcctcgccaggggcagcttggtggctgccgagtggaggccagaagagggcttcgtggagttgaagtctcccgcggtgagcggcgggctcggggaccggggaccgccctccctgccctccctgccctccctcccttgtgacacttgctctgggccccacacagggcaaattctggcagaccatgggcttctcagagcagggccggcagcgccttcacccggaagaggccttgtatcttctggagtgtgtaagtggggcccgggaggtggggaaggagttgggaccaaagaacgggaaggacacgttttatcggagaaaaagcacacacaacccggtctttagagaactgataaccaaacttctaaagcaggaggtggtacgttgcagggagcagggattccagtccacattagtgatgctgccccactttcctggttggccacattcttgatgcgctgctgagagggggagggggaggtatcagagctgggaagttgccccattcctctgtggcactgtagtgagggctcataagctgagctgttggccccacttccagggctccatccacctcttccaccaagacctgccactgtctatccaggaagcttaccagctgctgctgaccgaccacactgtgaccttcctgcagtaccaggtatctgccaccaccccgcctccgggagccacccatccactgaatcaatgagtattgacaagtacccataaggtgccaggcacagtgtcacatgctggggctgcagggcagacgagggctatgctgtcacgaggcttacattgtggtggtggcctgttggcttcacatagaccccagtgctgtcagaagataaggtgggggaagagaatccaaagagactgggctgttcattcaggtgagagaagctaggggcttgtcgcaggttgggggtgggtagagttgcagtgagtgaaaaatagatgaatctcagaaatattttggagaaagaatggataggactgccaatggattggatgtcaggattaaggagagagaagaacccaggattaccgcccatgatttgggcatgcaccagtggatgaaggtgctgtcattttctgagtgggaagaatgaagaggagcagatttgggaggacaagaccagtcgaaagaactgtgtcagataagttaattttgaggagcttcttggacatccaagtgagtgtaaagcagacagacaattggaatccaagtctggagtgtgaggagaggtcaaggctagatgtaaatatgggtgccatgagcacatggatggtatttaaactactgggctgtatgggagtgccatcagagtagagggctgggtctgagccctggggctctctgtgtaggttagggggcagataagaagcagaaacagaccgaggagtgtctggtgatgcaggagaaaaaccaaagtcgcatcacagaagccaaaagaaggtctttcaaggaggaagtggttagctgtgctaaagcctgctgagatcaagcaggatgggggacattcttatctatgttcctctgatatgaatgcagggacacaaggttgaatatgtggctccctaccagaaacttcccaccggcatctgtggaggtgtggggctggagagatgcccaccacctgccatcattttgttcacatggtgatcggcagcttcactcctatgagctttgtatcaaaatactcaagtatttcagggcgtggtggttttctggtttcatggctatcagtttttttggatttggctaaatgtcatttgtgccgagtaaggtaagtgggaggacaggaattcagagcctgagatctttagggatggtgttcgtaatgaagcatggtccaaccttaatcacagggtttagaatctgggggtgtacaggaggggcagagagggctgtggggatggcctgtgtctggagaaaccatttggtgttttccagagtggccatctgagctttcattttttttttttcttttgaggtcttcagccacctgaagaggttgggttatgtggttcgacgattccaaccaaggtaaatccccttcctgttccccttccatatattctagtcctgggacctggctgactagtctaaggtagaaaatggcctctccttacctggaacccttggctggagtgcagttccttgggcacagactgggggcgcctgctggaagcgttctgagagaggcaggttgggaggaatccaggtcattttgttttattctggtttatgaactcgagccgcatcttcagatgacctgcgcctgcagctgagtgtgtgtgagcactgagaggcaggattggaacagtgcctggcacttagtaggtgcgcaggcaggtatgtagagtgtatgcttaaatgaaggactgggtgaagaatttaccattagtagggtttcacatttttcatgccaggttaaatgttttttccttcatcaccttagtaatccagcattggtaaaaggcagagaccttcagacttggagtggaaacgggtacagcttttgcagttacagtatgtcacaaaagctctaaagcaggcacatcttttcttttctttttgagacggagtctcactctgtcgcccaggctgtagtgcagtggcatgatctcagcttactgtagcctctgcctcctgggttcaagcagttctcctgcctcagcctcccaagtagctgggattacaggcgtgtgccaccatgcctggctaatttttttattttattttatttttagtacagatggggtttcactgtgttgcccaggctggtctcgaactcctgacctcaaatgatcctcccgcctcagcctcccaaagtgctgggattacaggcatgagtcaccacgcccagctctacatcttttcttttctgaaagtggaacctatcctaaggaaataatcgtggacgtgtacagtggttcacctgtgagaatgatcaacgatatttattatttgctgggggtcaggccctgtacacatcgctgagaacagaagagcaaaatcactgccctcacagagcttgcatttagtgaggagtcacacagaacacactcactgtgcaaaatcagtgtacttgcaaacaagagttgaacaagaggcaggctcacacaaatgagaggttatcccttagagcagctctgtccaatagaactttctgtaatgatgaaaatgttctgtgtctgtgatgtctaatacatggggctagagcaactgtgggactgaatgtttaatttcatttaatttaaatgtatttaaatctaacttaaataggctggtgtggtggctcacgcctataatcccagcattttgggaggccgacgcgggcggatcgcgtgagctcaggagtacgagaccagcctggacagcgtggtgaaaccctgtctctactaaaataccaaaaaaaaaaaaaaaaaaaaatcagccaggtgtggtggcaggcgcctatagtcccagctattcaggaggctgaggcacgagaattgcttgaacctgggcagctgaggttgcagtgagccgagatcttgccagtgcactccagcctgggcgaaaaagcgaaactctatctcaaaaaaaaaagcaaacttaaatagccacctgtcgctagtggctcttttttgaacagcattgccttaaagccttaattcacagccaggaggccaggcacagtggctcacacctgtaatcccagcactttaggaggccgaggcaggtggatcatgaggtcaggagatggagaccatcccggccagcatggtgaaaccttgtctctactaagaatacaaaaattagctgggcatggtggcacgcgcctgtagtcccggtactactcgggatgctgaggcaggagaatcgcttgaacccaggagatggaggttgcagtgagccaagattgtgccactgcactccagcccggtgagagaacgagactgtgtctcaaaaaaaaaaaaaaaagaaaaaggaaaaaattcacagcagggaagaatgctgcagtgacggggctgtgtccacaatatattattgagtgaaaaaaaagatcacaaagcagtatgctagtacaatgacatttttgttagaaaaaaatatatggagagagattagtgtgtacataaacgaaagaaagatgttaacaatagttatccaaggtttttatttttctatatttaccaagtttgctagctcctctgggccattgcctaggcagaggcacatggctgggccccctggctgggcctgtacccctcatgggggtctgcttagggccttagcacttgggtgtggctccgatcctggcccactgactgtcctcttggcccgtttccttacacatcccaccagatccccaggctgaggaggtgggtcagtggcccacccgctgttctcaccccacagctctgtcctgtccccgtatgagaggcagcttaacctggatgccagcgtgcagcacttggaggatggagatggcaagagaaagaggagcagctccagccctcggtaactcccacatcacggtggccccccagggagtgctggtgtctgggaccttggaaaatgcacaggctttctaagaaccagcagctcccatgcaggctcagggagacactaggggacctgccttcagctcccatgggacgtgtgcaccttagcaaccaggggcagatgtgctgcttttcccccacgtccctcaggtccattaataagaaggccaaggccctggacaactccctgcaacccaagagtctggcagcctccagcccacctccctgcagccagcccagccaatgcccagaggagaaaccccaggagtcaagccccatgaagggcccagggggcccctttcagcttctggggtccctgggccccagccctggcccggccagggagggggtggggtgcagctgggagagtggcagagccgagaacggagtcacgggagccggtaagcggcgctggaacttcgagcagatctccttccccaacatggcttcagacagccgccacacccttctgcgcgccccagccccagagctgctcccggccaacgtggctgggcgggagacagacgctgagtcctggtgccagaagctgaaccagcgcaaggagaagctctccaggcgggaacgggagcaccacgcggaggccgcgcagttccaggaagatgtcaacgccgatcccgaggtgcagcggtgctccagctggcgggagtacaaggagctgctgcagcggcggcaggtgcagaggagccagcgccgggcccctcacctgtggggccagcccgtcaccccgctgctgagtcctggccaggccagctccccaggtaccccctcagcctgccacatcttcgagggccactggcagctgaggaatcacaggactttggaaagggcatggatgaactgggatggattgaggcttaaggaagatgtgggaggagggagtggacccacaagcacggtcagttctccggcggctgcagcagggcctgtgtgggaaggcttagagatggtgagtcaggagaggtaaggaggggtggaaactatgaccatatccttaaaaagataaacaacatgcatgtggatggctttgccaccaactagctgtgatcccaacctgttagatgggaaaaggaggtgccttcttggccaagtgaaagaaaggcttgctgtctgctctaagcccagggaaccaatggggaaagaataagctaaatgtgttaacggattccaaattacttaaagcctttatgggaacacggtagattgtaggtaactagatagggttgccagatcagtttgatttgactttcagtataatttttcagtatatgttccaaaaattgcatgggatatgcttata[132 bp omitted]accatctctactaaaaatacaaaaattagccgggtgtggtggtgcacacttataatcccagctactcaggaggctgagacaggagaattgcttgaacctgggaggcagaggtcacagtgagccaagatcacgccactatactccagcctgggtgacagagtgagactccgtttaaaaaaaaaagttgctaaatctggccgtcctaaactagatggcagactgagaaatgtgactcccctccccagtaccttgttttctgtgtccttgtagccgtggtccttcagcatatctctgtgctgcagacaacacaccttcctgatggaggtgcccggtaagtttccaagcagtgccgtctctgcagtaccttgaccgccaggagttggtggttaggaactggctcctgaagtagggtgtaaactagaggactgttccagggactcctacccctacgcctagctctgagcaataactagtgttcgtgtgtgtctagggaagagggagaataaccagtgggttagcccaagggttcagagcccccaaccctcaagtggcacctctgtgaggctgcttcctggaactggtggagggaaagggtgggatggaaaagaaaggttggggagaagagttcatgtcataacgtttctcattgtattgtcaggctgttggagaagtctgggggcttggaaatcatctttgatgtttaccaggccgacgctgtggccacattccgaaagaataaccctggcaaaccctatgcccggatgtgcattagtgggtacgcagtgagccagcactgcccctcccccagctgctgccagttctcctgtgaaccaagtgggactcctctgtactcccctggccagcgtgccaatctctgagaggaacaggaggtccagagaggctaagtgacctacacaaggccacacagccagtttgtgctgccctactctgagctcctcgttgctggcattttagggtagtctttctccaatgccattttagtctaggactcacccagcagaagggatgtggattgtggggatttacaggctaagagtggtgagcaccttgctcttcctagcacctccccaaccagtgctctggggcgctcttcatcagagccctgtgttttggagacagaactcatgggtcagaattcttgcaccccaactccttccgtagaatctcttctctgggagccctagagcttaggagtgggctatggctgggtctcactctaaccctttgtccctgcagatttgatgagcctgtcccagacctctgcagcctcaagcggttgtcttaccagagtggggatgtccctctgatctttgccctggtggatcatggtgacatctccttctacagcttcagggacttcacgttgccccaggatgtggggcactgacctcacagctctgcagaggatggagcttgctccgggggaccgggactgtctgttctcagggaccatctcggctgcctcctgtacccagactctaacctgtagcttcagaggccagtctgggccttggccctgggtgtctgatactcacagagtgaaactgtgaccctctcccttccctgctgccttgcagtgacccctctggaactcaggactcgattttaaggacccaggaggtggggcagaagagaggactgtgtgcctttaacgagagggtgcctgcttcgtgctataaagccaaagccattaaaaatagatttcttttctgctgtttctgtatgtactgggtaaacccctctcgcccccgtcccgttgtcagtggaactgcccccagcccctcacccctgctttgcccactcaaggagatccgcttcctctggtgcgggatctaagagtgagagaagcccgcgggatagcaggaacgcgacctcgaaccttttgagcctttcccgggcctgcgtcggaggggatgggacgtcgcaggcttcccgaagggaggagggaggacggcgcgccatcggcccttccctgggcgcagcggggtgcgggtggcgagaggcgccacctgcagctgggcggtggagcgcgctgcagccccggcctccgcgccctttccgctcccgcctctcgtcgctccaacctcctccctcgcttgtgctaaaaattccacccgctgttgcagaccctccggccgacacggaggaggtgggcgcccccccgcacccccccccgaggaaaggcgtctcgccgcgacgccccggtccctacaccatccctctcgtggggctggaaacccggccctgcgtcccccggtcaccctctctgggctgggctctggcagaggagctggcccggatccgcccctccctcggcagctcccgggagttggagggacggctcccctggagtctgggaggcggcccgggaccgcaggcgttccgggaactatttccgcttgcgggaggcggcgggacactgggcgcggcgcgccgttctgcgtccaggtgcgcgcaggtgaggccggggcgggcctgcggaaccccgaggccgttcgcgaggccccgccccgcgcttcccggggccgcggattggcaggagcgcagcccccacccccgagggtgcccccgcccctgcggcgccgagctggggggcgggccgggggcggggcgctgggccccggcaggctcgccctttatgtaaatagcgcggctccgccccaggctcgccgcgccggaggtgagcaggaaggagacggccgcccagcagcccgtgggcaggcgcggcggagcgagcggggccggcggcgggcgccgagggacgccgaggcctcgggcgggggctggcccggggttccaggtgagatgcgtgccggactcgcccagccgggcccgccccctcggggcttccacctggggcggggaggccagggaggcccaggacccctgggctgtcgggccagggcgggagggctgcgcccaggtccgcgcgcctcgcccctgtccgcgtcgctgtgctggcctggaagagagacacctgtagaaagttctgcgggaaacttctctgcctgatctgcgcgatgactgaaacttgggcttgggtttgcacaataatgttggcttaggagagcaggagaacaggtgccccggccggctgggtgcggggggcaccgcgggcagagacggagtccccgggcccacgtgcaggcgccaggccagcggggttggcgacgcgcgtctgcggtgaccccctccccacgggcggcggccggagcgcggtgccccggcggcttagcccctgcccctgccatctgggctgtgtccctgccggccctttgtgcctcctaatccccggacgcaggaagcccgcgggagggacttcggtctccggcctttctccagctggggcggctttggacaccttcacatgacagtgcggagacccagtctgccctccatgctgacgggcggggtttgcgctgtgggatttggcgagaagtggaaaattctatcttgccaaagaaagtgtgtcttagtttgttccggctggacgattggtggacacgctgggccttggctgtggggagaactgacctaaccaggggagctgtagagtggcgctttgaggctctcacctgaacaggtgagctttgagtgaggagggcgccccttcccctggggatccgtatgcgactgccggcagccttaacctgggctccagggaccccctgctggagtttgtagttcaagagaaccttgagttctcttgaaggggctacagagaggattctgagcagggagcgggcagggagggaatgggtgtgtcaaggtgacaaggaaacgctggtaggaagagcagagctgccacagaagagctgtggcccagcccgggggaagccaaggtcagaagtggcagttgaggctgggtgcattggctcacagctgtaatcccagcactttgggaagccaaggcaggaggatcgcctgagcccaggagtttgagaccagcctgggcaacatagtgagacctcgtctctgcaaataataaaaaaagttagccaggcatggtggcgtgcacctgtagtcccagctactcaggagcctgaggtgggaggattgcctgagcccaggaggtggaggttgcagtgagtcatgatggcgccaccacactccagcctggggacagagtgagaccctgtctcaaaaaaaaaaaaaaaaagtggcatttgaggaaaactgtctgggtctgtgtgagcagaggcacaaggagaactgtgcgagagatgtctcagctttattttatgaactgggatttggggtttagttttcttaggcgatcttcccacagtgctagctgtggcagacagaactcaaactcagctcttaagcttctaatcagagttcactcctttcctctgaagttagactgggcccatctttgtgggggctcctggacagggtttccggggtccagggtcatttggcatccccattcttccttgaggcaagggagtttcccctttggtgtcagattaatatgcttttaattatattaaaatgacactacattcataaataagaaataaaatagaaaaaagtaacttttttctctttttttttcttttttttaaactaagttgaccaaattctttttttctttaataatatgttttttaatttgtagagatgggatctcaccatatgttgcccaggctggtctcaaactcctggactcaagtgaccctcacacttcagcctcccaaagcgttgggattacaggtgtaagccactgtgcccagctgttagtaactttttttttttctttttttgaggcagagtcttgctctgtcacccaggctggagtgcagtggtgcaatcactgggagatggaggctcactgcagactcgacctcccaggctcaagtgatcctcccacctcagccttctgagtagctgggactacaagcgcgcagcaccatgcacagctaattttctattttttttttagaaagggggttttgccatgttgcccaggctagtcttgaactcctgggctcaagtgatcctcctgcctcccaaagtgttaggattacaggcatgaactgccacgccagacccgttagtataaataactttttattatttttatttatttatttatttattttgagacagagtctcgctctgtcacccaggctggagtgcagtggcgagatctcggctcactgcaagctcctcctcctgggttcacgccattctcctgcctcggcctcccgagtagctgggaccacaggcgcctgccatcacgcccggctaattttttgtatttttagtagagatggggtttcactgtgttagccaagatggtctcgatctcctgacctcgtgatctgcccctctcagcctcccaaagtgctgggattacaggcgtaagccaccgcgcccggccttaaataactttttaatataccgcaacattaaaagaaaaaaaggccaggcgtggtggcttacacctgtaatctcagcactttgggaggccaagttgggccgatcgcctgaggtcaggagtttgagagcagcctcaccaacatggagataccctgtctctattaaacatataaaatcagctggccatggtggcacatgcctgtaatcccagctactcaggaggctgaagcaggagaatcgcttgaacctgggaggtggaggttgcggtgagccaagatcacgccattgcactccagcctgagcaacaagagcaaaactccatctcaaaacaaacaaacaaacaaaaaatggcccataatcccaggtgatcgctgttcatttaaaaaatagaaaaggcaataggagcccatagtgggaaaaaggaaacattgtagaaagtgtaaaattagagagcaaaaaattaggccgggcaaggtggcttatgcctgtaatcccaacactttgggaggcggaagcaggcggatcacaaggtcaggagttcgagactagccttgcccacacagtgaaaccggtctctacttaaaaatgcaaaattagccaggcgtggtggtgagcgcctgtaatcccagctactcaggaggctgaggcaggagaatcgcttgaacccaggaggcagaggttgcagtgagccgagatcgtgcgattgcactccagcctgggcaatagagtgagactgtctcaaaaaaaaagagagcaaaaaattatccctcctgcctgacagtccttttctttttttttctttgagacgaagtctcctctgtcgcccaggatggagcacagtggcgtgatctcagctcactgcaacctctgcctcccaggttcaagcagttctcctgcctcagcatcctgagtagctgggattgcaggcaggcaccaccaggcccagctaatttttgtatttttgtattttttgtagagacagggtttcatcatgttggccaggctggtcttgaactcctgacttcaagtgatctgcctgcctcagcctctcaaagtgctgggattacaggcatgagccactgcacccggcccctgccagtccttttatcttcatccttcatccttctatccttcatctctttaaaaacaaaaaataaaaaaaaattaggccgggctctgtgtctcacgcctgtaatcccagcactttgggagaccgaggcagacggatcatgaggtcaggagatcgagaccatcctggccaagatggtgaaaccccatctctactaaaaatacaaaaattagctgggcgtggtggtgcgtgcctgtaatcccagctactcaggaggctgaggcaggagaatcgctggaacccaggaggcggaggttgcagtgagccgagatcgcgccactgcactccagcctggtgacagagcaagactccgtctcaaactaataataataataatttttaaaaaaagatttttagtgtctttctaggcttcaggtgtagttttgactcgttctttgccgagtccttgctgtgtgaccctagtgtggtcactgacccgtgctgagctttgttttcacagatgagaagatgagaaaggtcactagcacgtgtggcctgccacacagcaggcacccagtgagggtggactcaacttccatgaagcataagaggcatccgtctgtcccaggcctttgggtgggcacttgggccttttggaagtgcctgatgggtttagggaatttgtcttctctggaaatcagctgacggctcatgaatttgtgatattttaaagtctctggctgggcattttggctcatgcctgtaatcccagtgctttgggaggtggaggagggaggattgcttgaacccaggagttcaagaccagcctgggcaacagtgagatcgcgtctctacaaaaatttttttaaaaaattagctgggcatcagccagg[137 bp omitted]ggtggtgggcacctgtagtcccagctgctcgggaggc[144 bp omitted]ttgtcccaattacatgggatcgtaggaggatcgcttgagcccaagagtttgaggctgcagtgaactatgatggcgccactgcactccagcctgggtgacagagtgagactctaactcaaaaagagaaaaaaagtctctaggggtcagaagtttttcagcgaggacctttttcaggaattgagggcagcagtggagggcgcggcttctcctaaatggaccttgcattccagtggcccttgatgcttcccttgctccttgggagggccaagagtgagagccggttgcctgggagtctttcctgtggtggggatgtcggagagtgcaggattaaacctgctgtgagttctgccccagctgaggagtgcttgctgggtacaccctcctcaccctgctgggtggcagggcagagagcacaggcctgtgctgctctgttggcattaggagactttctaggaatgccattgtgccccctttcaaccttgcttggggagaggatgtcctctcctgccaggacttcctggccccgggaccctccctttggaagacgaagtgctgcctgggaccaggtggcccatgagcccctgcccgcactgtgggagatctgcgcatctctggcaagagcctccaggagccatctaaggagtttagtttccccggggagctattcggccttcctggtctttccagatgagtcaaaagcagctgttgagacctctgagttgggggccagaatggaggcccaagagaccaatgttctttctcctgggccggctgctttgagcagcactggcagcctggactcatttgtcctcaatcctcaactctgagaggccctcttatctgtcttaggtgatatcgttctcagggttcctcctggggcgaggcacgccaggtctgcttggcaacgctgttttcctctgtcaggagcagtttgcagagagaaaactggggacagggcaggagacgggcgtcccccagcggggccaccagcactgtttgccctccccagccctggctccctaggaattccaaggagaccctcgctcactgtgcccgtggccatggctttgctcaggtccctttggggtggccttccccacagccctgcctctcagaggaaactggctttgaatactcacccctctcttcttcccaggaaccacagcgaattcttgagctaggagaggctgctctgggcgtggggacgaggaggctgcaaggcacctgactctacccttcaggaattcggcagagactggagccttctctcgagacacctgacttagtgttcccagagtttgatgagagggacatctgggcacaggaccatatgactgtaataaattatatatatgtatatatacacacacacacacacacacactttttttttttttttttttttgagacggagtcttactctgtggcccaggttggagtgcaatggcatgatttcggctcactgcagtctccccaggttcaagtgattctcccacctcagcctccccagtagctgggattacaggtagctccccagtagctgctaccatgcccagctaattttttgtttgttttgagacggagacttgctctgttgcccaggctggagtacagtggcgcgatctcagcccactgcaagctccgcctcctgggttcacaccattctcctgactcaggctcccgagtagctgggattacaggcgcccgccaccacgcccagctaatttttttctttgtttttttgttttgagtctgagtctcgctctgtcgcccaggcagcagtgcagtggcatgatcttggctcactgcaacctctgcctcccgggttcaagcaattctcctgcctcggcctcctgagtagctgggattacaggtatgcgccaccacacctggctaatttttgtatttttagtagcgggggggtttcc[133 bp omitted]attctggaattctctgggggtcctggagctttggttaaaggcagggtccacaagggtattccgaacaggatgccaggcatgacgtccacagggccctggccttggccggagacttgaggacagggtaaggaagttccctgagaaccctgtggggtcctacctcagtgtttcgtggggtcagtgattggcagataccttttctagttaatccctagtcagtcttaac[173 bp omitted]cacgcccggctaattgtttgtatttttagtagagacaaggtttcaccgtgttagccagg[136 bp omitted]ggctggagtgcagtggcacgatctcggctcactgcaagctccgcctcccaggttcacaccattctcctgcctcagcctcctgagtagctgggactacaggcgcccgccatgatgcccagctaattttttgtatttttagtagagacagggtttcatcatgttggccaggatggtctcgatctcctgacctcatgatctgcccgcctcggcctcccaaagtgctgggattgcaggcatgagccaccgcgcccagcccgttcaagtattttctgatgcctcttgtgtggttctagatgttggatgtgatccttaaacaaagcaaagatgtctgccgtcgttgaaagttgtttctaaaaggtgagaagcctgactgacagaaagtaaaagtaactaataaattgtgttaaaaggtgatacgggctatagggtaaaaagaactagagcaacaattgggaacccgcatggtagggggcaggttacaacttttaacaggtggttagagtgggcctctgccagaaggtgacatttgagcaaagctttgaaggaagtgagggagctgtttaaataaaattccagtccctcccatgaggcacctggatgaggccagcacaatccccacctcctggagctgacatctggaagcttcttgggacagctgttccagttttagggcaggtaggaggccctagaaaggggcctgattggatgggctggatggcctgcccacgccagccccaggcaggtggtccatcttctccccagaatggttttgcttttccttggacttggctttctgccagtcacttccctggagagagagtctggtgttggattatgaaagggggctaaggcccccagaatgggggtgcgttcccaccttccaccccatcctcacaggcccaggaggggcaacagaaaggaaacttcaggaggagtctaggcatggcgggaggatcctcttggggttgtgggatggttgtgattccataggatagatggtggggggaatggaggctgaccccaaatggggcccatccagcctgcgagcaggcagcccctttgtcctgggagagaggcctgacctgagcggaggattctgcagtcagattggaatgcaaattggggcttggatttttttttttctttttttgagaaaaggtctcgctctgtcacccaggctggagcacagtggtgccatcatagctcactgcagcctcaacctcctgggctcaagtgatcttcccacctcagcctcctgagtagctgggactacaagtgtatgccaccatggctggctaatttttaagttttttgctgagacaaggtctccctaagttgcccaggctggtctcgaactcctaggttcagtggattctcctgcctcgacctcccaaagtgctgggattacaggcataagccactgagcttggcaaaggacttggactcttgactgtttgagcttggggccactctgaatcgatcacttcataagtaattgtaagaattaaataaggtgaatgtaaagtgctaaagtcacatccagccatagctagctctcaatcccttttactacttaattaacaacagcggggacgacagtcctccagtcatgcccccattccctctggtttgtgttcccctagatcccactccatggaactgcctttcagccaaggtttggttgctaagctgctggccagggacctgcctggtgcttctgggagactgggcttcccagggcgacatgggcacttgcaaagcggctacaggcgtctgagttggcacagatgccgcaggggtcagcagctgcctctgtggtttagatccctgcccaccagtgccatcagagtaggaggtgcaggggcggattcacatccgtcaaacaggaggccacagccacactcaggcctcacacaggatgtcgcagaggggaaggcagcttcttaatcagcagcgggctgtggggagcacgagcgaagaggagaggagagcatgggacatcaggtggcacgccctgagagcaggcagctggcgctgggtgcggcccgggggccctctctggtttcggctgggtctggagtcctgccgctgggtgtggactctcccagcagatcaatgagatcaatggaacttcccgagctatggagggagtttcttgagggctggcccctcccacatctccaggccagagggctggctgggcttggccaagccttggtctcacagggacaaattagcccaggtgccccaaacagtggcagggtgggagaagcagtctggcctggggatcccctctcctccgaggcacaatcgcatctgccacttagagcgaggggggcccaaggcaagtccaccccgtgtggttattctctctctctgcccccactggtctctttcttgagctcttgagatggaaggcgggccagggtgtggattttgtggcctgtcaccaagtggagagctctcctgttctttccaagtgggtgtccaggtgtgtggacacctgtcctagacccagaaatattttgccggccaggtgcagacgtgggtgagtggaacagtgaggagggaaggaaacaggtcgatcagctgcccacagggagctctcaggctggttccacatgcaaggcacagacttgggtagaaagtggatgggaaccagccacaaggcagcaagccttttgcggcccggctctaaaccctggcgcccgccaaaagggaacagagcagggcagaacagggagggtggctcagaggctggtctggtgacaggcaggagtggagactgaggttggatggcctttagaagttagtggggtggagaaggttttcctgagaagcctcatctcagaggtggcgctctggctaggtggcaaccccagtgaccatttctggtgttagacttgaggacttggggggctcctcagcctgtgggctcctgaacttgtctcttctccacattcctcccaggtgtgtcacttaagtgcacagcacctgagagtttgccaagcccgctccctggccctgctttaaagcctcgggacgatggaatagaaaagtcctttctactcaggaccctgaaacccaaggttgcacagctagtcccacctgcctgtctccccgcctttccgggcctaactattccgtgtctctagggggtacctctccccactcaggttgcggtggctggagaggagcccacgcctggtgagcaccggaacattccaccagcaggacagggctggacccaccctcccgcctgaccatgcctggggcctctttccttctctctttgatcctcttatccaccctgcctaggaggcagataaacaaaaaggagaaaaaagaatcaccactaatcccataacccttccgagtacattgtcaaatatagggatttttaatagattctacctgactcttggattctttgtacatatagtcccatgccatgaaatggtcttttctccatttatttatttatttatttactttttgagatggagtctttctctgtcacccaggctggagtgcagtggcgctatctgggctcactgcaacttccacctcccgagttcaagcagttctcctgcctcagcctcccaagtagctggggttacaggcacccaccaccatgcccggctaattttttttagtagagacggggttttggcatgttggccaggctgctcgcaaactcctgacctcaagtgatccacccgcctcggcctcccaaagtgttgggattacagacgtgagccacagcgcccggcccttttattccttttaatgactggaagccttttgtcataggcctgagcacacttcacccatcccctgttgtgggccatttaggttgcttctgattttttctgacagcttaataaacagcacatcaaggccaggagacatgcatgagcctgggaggctgtccctgtccaccatggtttcaatggatcattttatcctaaggtgtgtttcttccccatctgaacccatcttgaccattctcaggactctgagataaaatggtccctttaccccttaggataaaatgatcccaggctgggtgcggtggctcacgcctataatcctagcactttgtggggccgaggtgggcagatcacttgagatcaggagttcgagaccagcctggccaatatggtgaaaaccacagctctactaaaaataacaaaaaaattagccaggcatggtggtggacacctgtaattccagctacttgggaggctgaggcaggagaattgcttgaacctgggaaacacagttgcagtgagctaagattacaccactgcacttcagcctgggcgacagagcgagactccatctccaaaaaaaaaaaatcccttaaaaccatggtggacagggacagcctcccagcctcctaggactcggagaatggtcaggatgggttcagatgggaaggctttttggaaggtgacctttttttttttttttttttgagacagtctctctctgttgccccggctgtattacagtggcacaatctcgattcactgcagcctccgcctcctgggttcaagcaattctcctgcctcagcctcctgagtagttgggaccacatggtgcccgtcaccatacctggctaattttttgtctttttagtagagatgaggttttgctgtgttggccaagctagtctcaaactcctggcctcaagtgatcagcccgccttggcctcccaaactgctgggattacaggcgtgagccacctcgcccagcctggaaggggggccgggctgattgagggggcaagaaggtatttcagacagagaatggcagggaccatagtgaatggggccagggtggggctgagtagatggagcagccaacagggccaaggagagagggccagtgacatggaggagggaacggggggtgggcaggccccatcaggtccctgcctaggacagctcaggaggcccactttgtcatctctctcatgtcatctgcacagatctctgcattgggccccccacttgtcttcatcctgaaacatagaagcctctctcatcttgaggctttgcagctgttgttccttctgcctaacacactgtgccccaagttgtctgtggctggccccttcccaccagtcagtctcagtggagacctcgcctcctctgttcattcattcattcaacagataacgagtgaggactcgctgtgtgcactcggatacagcagtgaataaaaggacaaaaggtcttgaatgggaaaaagaaagctgctgcttgtgggggattccacaggtaatcaacaagattaataagtaagctattcagtgtgtccaaacgtggccaggtccaaggagaaaagcggtgcagggagggagagagaacatcccaggagattgcagcttcaggtcggggagggcgtgaaggtatctggaggaaagtgacccaggcagtaggaacagggaacgcacaggctctgacaagggaatggtcactgagacctgttggccaccaaagcctagttgctggatcttcgcatcctctttttctttctttttcttttttttagaaacaagagtctcgctctgtggcccaggctggagtgcagtggtacagtcatagctcacagcagcctcaaactcctgggctccactgatcttcccgcctcagcctcccaagtagctgggaccacaggtgcttgacaccatgcctggctaatcctttttgtttgttttgagacagagtttcgctctgtcacctaggctagagtacagtggtgggttcatagctcactgcagcctcaacttcccaggctcagcaatccttccaccttagccttttgagtggctgggaccacaggtgcatgccaccatgcccagctaattttgtttttattatttttagagatagggtctccctatgttgccctggctggtcttgaactcctgagctcaagtgatcctcccaccgtagcctcccaaagtggattacaagcatgagccactgtgcccagccctcctttcttttcaaaatttttattgttccatgtaaatttgaaaaaatgtcctttccttttttttttagagacagggtctcactatgttgcccaggctggtcgtctccagctcctaggctcaagtgatcctcccaccttggcctcccaaagtgctgggattataggagtgagccaccgtgcccagcccatctcttttttttgatcagagatagtcctgacctctgtcagaaatcatcccattttctggttacttttttttttttttttttatacagaatttcactccgtcacccagactggagtgcagtggtgcgatctcagctcactgtaacctccacctcccaggttcaagtgattctcctgcctc[134 bp omitted]tcggcctcccagagtgctgggattacaggtgtgagttactgcggctggttggaaatcatcccattttctgatttgtgtcctgtgaagtgtctgttgctcccctgtcactgctgtatccctttcctaggacagtgtctgctccatgccaagctcttgctccttctacaggatctgtgtgggagggagtgccatccccctttacagaggagctgtctctggaggccatgtggcttgggggagctatgcggtgctgtgatggtgagccctggcctgttggcccctagcccagggctctttcccttacaacccctggctccctccaggaatgggctgagtaggcaggatctgttcataccaggcgtctctaggcctggcttcctgaagtttctctgcagagaacctgcttgtctggggtggggagctgaggagccacctggaggtgaggcccgccaggtctagaccagccccctcttcaaggaagcgtggtgcttttccatgccttgacctgggcagtgggttgattggagtgaggggataccatgcccaccctgccttggtcctcctggctccatcaccccatgcccatgaggtcccagccccgtgtgggaagagcagcaggtccacacaaggccaccagccctgcccagccagacctcgccagcaccctgtcagcagcggccagtccccaggccccagactgccgggtcggctctgagctgccagcatctgggagcgtgtctgtgcgtgtccctgcctcttaattgcaagggtgtcattgggcatcctttgttctgtattatccatccatcactgctacccacagcccttctgacttggggtccagtccgagttctgccgcttcctacttggtgaccttgacagggtgttttgctgctgtggtctgtttccttgcctgtctagtggggacgttctgcttacctttcagatggcttcccagatcagggtggtgtgaggggctccacgctcacaaactcacacagtgccaaggaaaggagatggccaggacattcagcgacccatgactgtgactctctggatgctggggtttagggaggattttcttgtctgtatttggtttttctacaatgggcacagattacttgagcaaaatgttttaaatggaataggatgcagagggtctggtacactcactccctactgcacagcaggtgccccagggagcatttgggtgggtgggtggtgctcagtgtccacgccctcctgatgccattgctacaccctgtcttcctccttcctactggcacctcctcccagcccccagttctgccttgtcacttttaagcctgtgtggagtctttggcacggatggccctgtgccctcttgtcccctccctggagtctgcaggcagtggtcactctccagggagcccccaccaagcttcctctgacttctgacccagtgaccttggcctgggccccgggtgggggtgtgagccctccaggagtccaactggtttatgagtgtgagctgccctcccccaggctgcaatgctgggccagcagatctgggtgtcccctcacttccattccagaagcccttggggctttcccagccggtgcctgttctctgaacccccttgggaccttggatcaagtgggccctaggagtttcccggccacctgctcttccccagcaaagtgggatccccacctctggtctgactcctccaaaatgtgaaggcaggaacatcccggaatgaccccctttttcagtttccccagaaggtgacagcgctctgggggctggttcctggtattcggttttgagataactgaccgtgcagatcctttcactcaagggggatgtggctctgctttttttttttttttttttttttttttttttgagatactgtttttgctctgttgcccaggccggagtgcaatggcctgatcttggctcactgcaacctccgcctcttgggttctagcaattctcctgccttagccttccaagtagctgggattacaggcgtctgccaccacactcggctaactttttgtatttttagtagagacgaggtttcaccatgttggccaggctggtctcaaactcttgacctgaggtgatccacctgcctccgcctcccaaagtgctgggattacaagactgccattttttacagtgcgattttgtaaaatcgggtcaccctcccagcacagcaagccctcggttcctctgcccgaagacacccccaactctgccacgcacgttacctaccttctcccacgctgcccagattacatgggatcctatcatatgcaaagtcctgacctgatggttaatttttgccacctcccaagaacgcgaaatccttcaaacctcagcttagataccttcttctcgaaggtatctaagctgcctcccacttcgggccaggtgttccctctccctcctgcagtcaaagcactcaacactgggctgccctgtctctacctgtccctgcctggagcacgcgcctccagggtgcggcctggatctgcttccttcccccatcctgctgggagtggacggagctgtgcccagggtctgtgtttcccaaggacgggccttgctgtcctgtggtcagcaggaggctgagctactggaagccagaagctggagcacagaggctccttccccttcccccaaggataatccagaaatggtttccccttgggctgggaatggattctatggtgggcggagagtttaggggccttgagctggtttctttattgggagcagattcctcctgattattctccactagggcccgtgggaaagagaacctttctgagcacagcccatgagcgcacagggaagctggactggggctagccagagagaggggaggggaccggcagagaccccaggcacggtggcatgggccagcaccccctgaccgagtgctctgtgccacccgtgcccacttgagtttctcatggctgtggctggttggagaggctgaggccgagagtccctggacagccttccccgaggtcagaaggaggaagcatctgcccggtgccctggcctggagtcactgcaggcctctcccctgccccgacttgggctctgatctgggaaggatggccttggtgtttctaccttccacaagactttggaggaagaggcttgcgaagtttccctttctgcttagctggagtttcatggtttctcagaaaacaggttaacaattaagctaattaacctcagggcccgccggccctccttgtgcttataaagccaggctaaatggcttcctcccccagcttttcctacccccattataaggccacaggtggtgacagccttcagccctgaggtgggccggcctctagatctgagcgtggggaagccagggtgcatgggcggtcactgtgaagctggcctggccccggggtggcagcctactggacttggagagagaggccctgctccacctgtttgggccgggcctaatcgatacctgagtgccaggacagacccctgcagctccttctgtttctccaggtctccagtgggggctgcagactaagcaaaatgaggcggttcctgaggccagggcatgaccctgtgcgggagaggctcaagcgggacctgttccagtttaacaaggtaagttagggagagcagggaagatgacccccaggttttcggccaagcagctcaggctggggctgaggcacctcttacctggattaaggtatagctcttatgtgactgcctgcagtgcctcttgggactcagactttggaaatggggcctggttaaagggcttttatagaaaaggggaataggttgccctcatgagttgggacttctcatctgaaggctttcactggctgtgtgacctctgcaagtcactccacctcatggagcctcagtttccctacctgtatcatgggaataaaacgatctgccatgtctacctcggcacagggttgtcaaggaggtttagggacgtgggagatgaaaggatgaactcttcagggggtgataatgttccaggtcccttggggccctggagtcacaggccatggctgtttctcccttctcaaattgcccctgaaggaaaatgcagctcccctgcaggctgaacacgtgattccttctggctccggccggggtgagtggggagaggtgcccaggagaatgagccggagttggcctcggactaccccaatcccaaacctgtatccggggtaccagaaggcccacggggcttcccttcaggagtctggggcctgagaaggtcaggacgggcctgtacgcaggaggcgtgcagtgtggctcttcagctcccgggccaccaagcagtgtggggccttgtgaggtaatgatcttctcacctctgctttgcgcctctgctgggaaggtgggctgcaggaactgggacactgtgatcctcttcccccggggagccaggaccctcccaatatgctgagggcaggacatgtggctttcgttgggggcttccgtttgggctcccctgcccccgaaaggaagcagtggatgtgagaccagacagtctggaaaagggatgtctccctgtggagaatgaggaagtctctttggttgtatttttgttattgatttgagaactgtagaagtcagcttgcccaggtgcaaacccaactttgccacatagaagctggatggccgtgtgcctgtcgcccacaccataggcttgttaagggcgtacgtggggtgaggtaacttaagtgctaggcacagtggcccaggaatgctggctgctgctgtgggctggaggggatctccgtgacctccctgttgggagaggtgggtcgtggggtggagggacctccctgacctccccgttgggagaggtgggtcagcgctcccaatgtgccctgccatttctctctgtgtttcttagcctgtgggaggagttggtgtccctgatggagctttgccacgaggacatttgcctctggaattagggctttcctatcccaacgtgcctcctgccagctcgcttttgggccttgggatatgggggtgcaggtgttgggaatgggagatctcaggacacctacagcctgctacccttgctctggagggagtagcctatgggtgctgggtctcaaagcttcggtgtccacgggagatggaagggaactgagtgacccccatctgcctccagtctttcgctttgaaaaggtggcagaaacctgacaggctcagcaaatagggctgaacacccccctacccctgcccccttgcaccaagttctgtctgtgcagctgagtgaggctagggtggagctggggcaaggagttgtcccttcttctttcccctatcccccaggggtgatccccaaacttgattgtcccactcccaggcctgggggtggcagagggaggctcctgggtctcctgctctgccttcttctttccattcatatgcaagaagcatgcattgagcacttactggatccacagcccaaggctcagggctatgggaatctgattaggcctctgccctccacttttacagtctgcaggagggaggaggctgatggcctgaaatttcaggccttggaagtggagaggaggaaggggagagcccaggggattcaggagcggggtagactcatccggctcggggagtgtggtggggccagcagggtgggattggaggatgaggccagatcccagaggatttgggatcccgtctgccctgcccctccccagcccaggctgtgaagcagggaggctgctggtatctgggcctgatctgaccctgcggctccaggggttgtgagcaagggagtgaatagtggtcccatttacaatgtaggaaagataaacctggagatgtttttaccctttgggcaaggcaggtaagctcagagcagttaggagacattgccccgactaagataggtgacagcccagaaggaagggactggaagcccagccagtggggatgggaacgaggcatgaattgagcagggtttctcaacttcagcactcacagatgatatttgaggctggctgtgctgcggaggctgtcctgtgcgttgtagattatttagcagtgtccctagtcctacccactagatgccagtagcacatacatacacacacagcctgtcaagatgtgacaaccaagaatgtttcctgaggggtaaaatcgctcctggtttgagacccatggaatagagaactattcagggctgagatctgctgatggggcagtaaagagggaggggatggggaggggaggcgggtgtgcaggatgaccgtgaagtctctgacctgggtaggtggtggtgccaggccttgggagggggagcccaggccaggagtggcgaagaacagatttgaggaaaagtaatgtattttgatcgttttgatttggacacaatcgcaacaacagtgctctccatttttggagaggcagcttgcccagaggtgagtggtgccgactgcccggctcgccagctgtgtgaccttgagcaggtcacatgcctctgagataatgataatcagagccactccatccatagagttggtgtgaggactacatgagttcctgcacgaatcgaaggccacgtctggctggcggctgcagtgtccggcagcatcgttctgtggtgggtgtcatgtggcttgaggttgagttgggggagccttgggacaggcccagcagacaggcggagggcaggtccagcagacaggcggagggcaggtccagcagacaggcggagggcaggtccagcagacaggcggagggcaggtccagcagacaggcggagggcaggtccagcagacaggcggagggcaggtccagcagacagacggagggcaggtccagcagacaggcggagggcaggtccagcagacaggcggagggcaggtccagcagacagacggagggcaggtccagcagacaggcggagggcaggtccagcagacaggcggagggcaggtccagcagacaggcggagggcaggtccagcggacggtgggatacccagggctggagcctggagcggcacgtgggctgttggtgtaggcgagggtcaggccccagacagtgttcatgctggcaactcaggtcatctcttccagtggtcctggaaggccagtctgctgggtactgtgacagctgggacagtggcgccatcacagctcgaccccaggtggcttgtagacactggcttctgaaccagttctggcctttttgtccaacaccttttggctcaactcctttatacccacaccaagcccgatgcctcaaagagagcaaggacatcgccccgggggtcctgagagggagacgtcttgtttctttggcttcagtacttccagaggatctgtgattgcgaacagtctctgaactctgccaggaactggctgtcagagcggtaactccagttcaccgagggctatgtgccaggcatcagaggggccaggtagtggttaggggcagggactttgcagccacatgacctgggtctagatgcgggctctgatgcttcctcactgtgtaagacacagtggacgcattacttagcctctctgttctttagtttcctcatctgtaaaatgggcattgtaggggagcaaaaactggcttccctccagccttctaggttctttggctgggctatgaattaaattgacgagaggcggggcgcagtggctcatgcctgtaatcccagcactttgggaggctgaggtgggtggatcacttgaggtctgaagttagagaccagcctggccaacatggcgaaaccccatctctactaaaaatacaaaaatcagttgggtgtggtggcacacgcctgtagtctcagctactagggaggctggggcaagagaatcagttgaaccctggaggcggagattgcagtgagccgagatcatgccactgcactctagcctgggtgacagagtgagaccctgtctcaaaaaaaaaaaaaatgaggactggggtggaatgtgaccaggttacaggaaggtgaggggaggaagtgtaggtgaatgaaggttgtcttgttatgcagagaaggtcctgggtaataaaagttgccttggagcagccttcttcctgatacagatatggattgagcatacatgatcagaaaatctgatatccgaaatgctccaaaatctgagtttttgaagtgccaacatgacactgaaagggaatgctcactggagcgtttcagattttgaaagtttggatttgggatgctcgaccggtaagtataatgcaaatattccgaaacccaaaagattctgaaatctaaaaccctctattcgcaatcattttagatgagggatattccgcctgtacttgactaatgtagctttcctttgtggatgtaaatttattttacagaaggacaattttttttttccttttttttttttttttggacggagtttagctcttgttgcccgggctggagtgcaatggtaccatctcagctcactgcaacctctgcctcccgggttcaagggattctccagcctcagcctcccacatagctgggattacaggcatgtgccaccacgcccggctaaaggacagcttttcagagctactcccatgtctgcactttctgagaataaccagctcaaagtatgccaaagaagtggccgggcgccgtgtctcctgcctgcaatgccagcagtttgggaggctgaggcaggtagatcacctgaggtcaggagttcgagatcagcctagccgggcatggtggcgcacacctgtaatcccagctacttgagaggctgaggcaggagaatcacttgaacctgggaggcggaggttgcagtgagccaagatcgcgccattgcactccagcctgggtgacagagtgagattctgtctcaaaaaaaaaaaaaaagccaaagaagtatactttggggtagcccattctggtctcctacagtggtattttggggtggtatgtcctgagttccaacagcatcataatgatccctaagggagtgtaattgcttcaaacggtgcctgacacaggtcgacgccttaccaggacttgccttgttgtggtgtcaccctcacaacaactcaggatgggtgttgcttccattctgcaggggaggagactaaggcccccagggcttgcacagctggagcttatccggggcaggggcactggctggggtgaggatgtcctggtttcacctgtggtctggctgtgtggccttagagtggtggcttcacctcccttcacacctcagttacttcaccagtgaagtaactgtttgctatatatggtgggccgtcaagcctattggagggatggacagacagacaagtcagctgcagcaccaggacagggccactgaggaccaagggaaggaaccatgggacctcgggagggaggaagtgctgctggagaagtcaaggtaaaacccgttcctagacaactgctcacagccagctcgctcccctcggccaaacccaggcacaccccaagcagccacacccatcagggcaaacaggctgctgtgcttgcccggctgccgcagaagcacctgcctgggccttccctgcccgtgcccaccctcctctgtccccttaggccctgaacaaacagtgtgttcctgacccagcagcccctgcggagggccaggttgttctgtattggctttcgaatggctgggcccctggtgtcaggtgacagcagccacacagggagggccaggctgccgccactgccaggaatctgagctggccacacccagccagtatcgggcagagtggcccggccaggcaggagtgctcccccaaggtgctgggcagcctctgagggcctggtgcccaccactgcctccttcccaccccctgaggagtgccagggactcctcctcaggtcctagcccttgggcagggtcctccctggctgcaggcaggatgaaggccccactgtctctgacagccagcctttgcccactcgctccccttccgggacctggaaaggagtcccagagcccaggagagacgggccttctcccctactccaggctaacgttgcagtctggcggcttctgcaaatctttgctctcctttcccaacccccctgtcaaaagagttcattgttctctcctcccttggcagaggtcacctgagccaggtatcagatgtgggcggggccgggtaggctggatgccgcgcttcggaggccccagtggctgccaggcagctttggtcagcctcctggtttgaatctgaggagagatagctagggtcctagaatagctggggagggctggtcttggaattccttgaccacccaggggctatgccccgtcccgccctctgtcctgagtgcagccgcgattcagggttgctgtgtgtacctttgcaggaaggcagccctggggctgagcccaacctcctgtgctcaggtgggtacttccttttagggaggccatatgcactccctctaacagggacctggaactgttcctgaaccctaaacaaggggggagtcaccacctaagtgatacagaccttgttcagcagcagggaagctaagccttacaaggctggtaggagttgggggtgggatccaagggggtgggaagggcaccaaagtaaggggcggggcaggccgggcgcggtggcttacacctgtaatcccagcactttgggaggctgaggcaggtggatcacttgagtccaggagttcgagaccagcctgggcaacatagtgacacctcatctctacaaaaaatacaaaaattagccagctgtggtggcgcatgcctgtagttctagctactcgggagactcaggtggatcacttgagcccgggaggaggaggttacag[131 bp omitted]ggagccttcgttctttccctgactggtttcctcaggacactaggccctgggtttctagcttctccctgtcccttctgttagctgctcttagtcctgttcccaaatcccaatcccttccctgttcccaacaagatcccttgggcttctcataactaacctagggctcccctgcctctctgcccagcccgagcccctgtcctcataggactgcctgaggaatcccctgggagacaggtcatttacacatgaaaccattctcttggccctgtccaggtagagtcgctgtgaaggtcactgcccttattttggttttaggggagccctggtccctccagagttgccaacttggagaagtgcccaaggtgatactatggaacaatgcgagcctcggaaggaagcagaggcctgtgtgtgctgcagggtggcctcagatccatcatctccaatccaaggacagctctgcccagtgcagtcaccagtaccatcccgtttattagatgagaaatgaagctcagggaggcccagcagctcatccacgaccagatgccttgtacgtggcaggaagggatacaaagcttagtgggtctgactcagtccctgttctaaatcagcctttggaaaagaaggtggggatgggggggaggggtggccacgataactccaaggcttgaagggaatgaggaatgaatgcgggtggttgaaggatgggcccaaccctttgtcttcctctgagttagaggaaagatgctgagccgaacaggagtagtgactctggtgaaatgttagaagaactgcccgcccttgacttgtggcctgagagcctagcaaaaagttacaggctgttttctctgtggcctgacgttcctgctggtgtgcggaattgtcgaggccaatgggaatataatatgagccatgtatgtgatttaaaatttcctagaagctgcattgtataattatttaaacacgtgaaattaattttaattatatattctggctgggtgcggtggctcacgcctgtaatcccagaactttgggaggtcaaggcgaggagatcacttgaagtcaggagttcgagaccagcctggccaacatggtgaaaccccatctctactaaaaatgcaaaaattagctgggcgtggtggtgcatgcctgtagtcccagctacttgggaggctgaggcaggagaatcatttgaacccgggaggtggaggttgcagcgagctaagatctcaccactgcactccaattaggtgacagagggagactctgtctttaaaaaaaaagtctagaagctgcattatgaaattatttaaacaagtgaaattaattttaatcctgtattccagctggtcaaggtggctcatacctgtaatcccagcactctggcactctggaaggctg[134 bp omitted]gaggcgggaggatcacttgaaccagggaggcggaggttgcagtgagctgtgatcgtgccactgcactccaggcgtgacaggcgtgaccctatctcaaaaaaaaattatatattccttttaatccaacatatgcaaaatattttgacgtgtgattaactactaatgagattttttcagtttgtgtttttgaatgctcaatttgtgaaatctaggtgtattttacacttacggcacatctcagttcagacattaaatcttttttggaagtactagatctgtatttagaatttggatgatttacagtggaaaaagggaattcgaagcgtggcctgcctgagtccagcccctgttcttctagaacccgagttgttccagacatacttgaagggtttccaagaactgacttaatcctcattggtgacatgagccatactgcaagtgcttggtggccccatggggctcatggctaccgttctgggcagctcggagcatggggcctgctcctggccaggccattgggctcctgtagggcatttccaccagagtcctccaaattccagaggctgttccctgagctgcctctgctgctgggaaagtgctgctgtcctgggagacggctccggctgctgacttcctgaggccccagcaacctggggctggctgaggtctggtggggcccctgggggagcttgtcctgcacatcctatcccactgtctactccccttttcctgggaaatgtttacattccagacactcagctatctctatccagggcttctccaggctctgcatttttcgcatagctgaacagggacctgggctggcctgggggccgctgctgggccctatctgtccccctggctatcccatttaggtatgaccatttgcagggcaggccctgttcctagcaaaggccaggcctgaggcaccccccgtctcccccgacctttttgtctccaggcatcccccaaaataggcacttgttggagctctcctccctgcctgaccccagcatgggattccttgtgagagccattggactagactgactgatgggggaggcaggtagcaattgggtttgctaagctatcattgctagatctcatcagggacttctccttttctgctgctttgaggcctggcagggctgcaaagtaggaaagcccagggcctaaggaggctgcctcattgttgggacctttttctgcaagtcagagtctctgtggttgttttttaagtctttaaagcaatcagttgacatagcatcgctttgtgctgttctcacctagctctgcagggtcactatcccccggggtgggaggcgggggtcagattggggtaactgattaagaaactgaactaaaaaccttcctgaagatggtttatcactctaaatttgtagtgggtttatgttcatacctttcttaacccacaattctatccctgggacatctgccccaggaaatactcaagtggtgcagacaaagataggagtccaagaatgccatcgacatggttgttggattgcaaaccctctagcaacaaagtaaatactcaacaataaacctctggtgaattaggatatctacaggtaaagaatattctttagatgttttaaaagtcattttaggccgggtatgatggctcacacctgtaatcccaacactttgagaggccaaggcgggcagatcacttgaggtcaagagttcaagaccagcctggccaacatggtgaaagcccatctctactgaaaatacaaaaattagctgggcatggtggtgggtgcctgtaatcctagctcctggggagactgaggcaggagaatcacttgaacctgggaggcagagtttgcagcgagccaagatcgcaccattgcactccaggctgggtgacaagagcaaaactccgtctcaaaaaaaaaaaaaaaaaagccattttaggcagcttgcagtgactcacgcctgtaatcccagcgctttgggaggccgaggcaggaggatcgcttgagtctagaaggttaagaccaggctggacaacatgacgagtacctgtctctaccaaaaattaaaaagtagccgggtgtggcaggtgtggtggtgcatgcctgtagtcccagctacttgggaggctgaggtggaaggatcacttgagcctgggaggccaaggctacagtgaaccgaaatcatgccgtagcacccagcctgggcaacagagtgagaccctcaaaaaagaaaaattaaaaatttttgtcatgcctgtaatccca[133 bp omitted]taggcaggagaatggcgtgaacctgggaggcggagcttatagtgagctgagatcacaccactgcactccagcctgggcgacagcgcaagactccgtctcaaaaaaaaaaaaaaatttttggctgggtgcgggtggctcacgcttgtaatcctagcactttgggaggctgaggtggacagatcatgaggtcaggagatagagacacggtgaaacctgtctctactaaaaatacaaaaaattagccaggcatggtggtgggcacctgtagtaccagctactcggaaggctgaggcaggagaatggcatgaacccgggaggcggagcttgcagtgagccgagatcgcaccactgcactccagcctgggcaacagagcgagattccatctcaaaaaaaaaaaaaatagacctgcaaacattcacaagtgcagaagactcgaaggatgtacacttaggttctagcaaggttacttctggttgtgggagtttgggtaatttttgttctttttttttttttttttgagacggagtctcgctctgtcgcccaggctgctctgcctgccgggttcgcaccattctcctgcctcagcctcagtttttgttcttaaacatctttatacctcccaggtttttcacagtgtgtgtgtgtattctgtaataaatgaaaaaaacacgtatgtgcaacgacactccaggaattccctttctgggaagatggttggaatttggtgacagtaagagtctgtgagacccagctgactggggcctggagggacctggaagagcccagagcagggcagggcctccgcggtactctaggcccctgggtgagcccggagctgcggtgcaaccaagattttctcccgagagaccggtgtctccattgttccaaactccccctactttccccaccccacacccataaggcccccatgccactgaggagggctgggtccgtcacccagggtgcacgtggtggaggcaccgagtcagttcctggaaagcattgagaggctggtatggtgtcggggaagatcagctcgcaggggtggccatgaggccaagggcagagtcacaaagggacagggggtggggcctggtaaatatgggttaggctccaacactcaggtgtctgggaggaaccggaaaggtaccgaagccctgcttcctgctgggtcgtctggtgctgcagctgcagcagccatggtggcgcgaaggggacaggtctgcaggcccaccccacgtgcttctcgttgcagacggtggagcatggcttcccgcaccagcccagcgccctcggctacagcccgtccctgcgcatcctggccatcggcacccgttctggagccatcaagctgtatcctccgtcccctcgctcccactcgggcagggccttggggtgggtgagatttggggagggacatcttttccttccttgcccgtgggctgttgggataaaatgagggactttcctgatttccagttttggacatgattttattccaaaatggggcaggtatggttgatggtggagcaggcacctgggcatgagtgcatccctggtgggatgcgaccctgtcctttgcaggaggacagtgaggtttgaaatggactgaggagatacaggcttattttgtctcctgtgtcctttcaggacccttcatgtggtctgctccctttactcagtttcccctctcacctattcctggaggtttcaggaatcccccagtcccgggcagggggtgaggctgctggggggctcagagacctgttttgcaggggttgtattggtggatccagagggaaggacctgacgcccatgtctcagccagtgatcattcagtgagtggctggctggtgcgccagtagcaaggcctaggcccttctgtgcccctgcctccctcagctccccacctcaccaccagaaaagcaagttacagggacccctcttgtcgctagggatgtttttaatttaaaaaaatttttttcggcactttgggaggctgaggcgggcagatcacttgaggtcaggagttcaaggccagcctggtcaatgtggtaaaaccctgtctctactaaaaatattttaaaagttatcagggcgtggtggcacatgcctgtaatcccagctacttgggaggctgagatgggagaatcgtttgaacctgggaggcagaggttgcagtgagccaagattgtgccactgcactccagcctgggcaacagagtgagactctgtctcaaaaactttttttttttttttttttttttttgtggagacagggtcttgtgatcttgcccagcctggtcttgaactcctgggctcaagcaactctctcgccttggcctctcaaaatgctagggttacaggcatgagtcactgcactcccagcctgcagttttgttttttaacctatctcgataagaatcagaggtggactggccccagggccctatccacaagcagagatggggtggccttgggccaggagagcagggctcggcagctgtcttccaaattccacccccactcccacaggcggcagagagtggagagggctctgcctggcagggacagtccttccccggcctgaggctggatgttgtccagttgggtcatcttttatccagagcactggttctggccgactgggggctcccagtgttttcagagatgaaaaaccggatcaggttgggcaccccgccagtctgatctgtgctcccctcagggcagggcccaagggagttgagagatgagggaccacctccaatagcttggctgccacctccagcggagcctgacctccctcttcccctctgcccggtgtgggggaggggtatggagcactcgagttccaggctgggctggtgtacacagggggccagggccttgctgcgggctcagccttccctcggctggttaatcattgccaggccacagccagactctagttaccaatccctggtgccaagactaatgggccaaggctgttggtgataggccccctggggtgccgtgtgttttttcacaggtgctaccaagcgacagccaacatgtcttttgcagctcaggatcagggtggcagcctgacagttgccagggtagggcttcgcctttctatggagttgctcccaccggcctgactgggaaaaatctcccagggatcaggtcactggcctggtgccccagggccagggctgctgtgtctcctccccaccctaggctccatgcatgggtcctgctgcctcgggggagggcagcccctctctgtgtttgcatcattgcacatgggccccgagggcctggcactcaaggcaggcaggggatggtgtccgaccttccagagctttcctgagcctactcctagctacggagccccaggcgtggagttcatggggctgcaccaggagaacaacgctgtgacgcagatccacctcctgcccggccaggtgagggacctggggtgggacaggaagccacttccatgccctccttgccttcactgcttccagcagggctggtgtggagaggctggcattcggtggccctgggtttgctgctgatggaaagacctgggaccccctccctttccacagctggggctcatgggccaccctgggagtggccagggggtcttttaaacaactggggctgcgtggccccagtgtgtaaaggccttgcctgggtagcaagaccacatgatcccgtcgtgtgccctcgccagtgccagctggtcaccctgctggatgacaacagcctgcacctttggagcctgaaggtcaagggcggggcatcggagctgcaggaggatgagagcttcacactgcgtggacccccagggtaagggctcaatccccagccccttccactcccagcccagcctgacccttgcccttagctctggagtggactcaccctttgtgaggcctgttgcgcccctggcagtgactggcatgcgtttggcccgatgcatcgccacactcaggtgctccgagtggagtgggcggggctgcagcctgcctcctccatccacaccacgcctcctccatccgcaccccacctcctccatccgcaccccgcctcctccatccgcaccccacctcctccatccacaccacgcctcctccatccgcaccccacctcctccatccgcaccccgcctcctccatccgcaccccgcctcctccatccgcaccccgcctcctccatctgcaccccgcctcctccatccgcaccccgtgttatgctggagggtccctggcgtctttcctgcctcctagcccaggctctctgccatctgtctcctgtcttggcagaaagtgaccaatgtttgtcctggcttgaaatgttatgacctcattaaagggccttatgggcttgttttccgaggagtcaggggaccccgtccatggcatctcccctgctgggcagtggtcggctcacgggcagctgttcttgtcacagggctgcccccagtgccacacagatcaccgtggtcctgccacattcctcctgcgagctgctctacctgggcaccgagagtggcaacgtgtttgtggtgcagctgccagcttttcgtgcgctggaggaccggaccatcagctcggacgcggtgctgcagcggtgagcccagagcccagctgctgttaactccatcccctcaagttaggcatggcttctccccttggtcccaggactctgtcaggagctgtcatttctctgctgggaattccatggggctatagcaggggaggctcttggcttcctacctgtcacctactgagaacctattggcctgtcataggttagcatcatagcactaaaaagggggctttgagggtccctcgtctaaaggccccaaatgactgtgtaatgtcaccgactgtcagtccagtgtcctttgcacttgccatgggtttcagaaccccaggggctccgcagcggggaagtcgggcccagacctccctgtgtcactggggcagctcctggtgccaccctttgcggtgggtactttgctgaggttccatttgctcgcaagctccgtggctaaaaagccttgaccgccacaggcatgtgggtctgttgagatcgtttcagaagctttgctccttgttgatgatactacattagagagggagttggatcaggtccgggtgggagaaggggacggggcccaaaaaaagagaggagatagcatctgacaagatcatgttggggccgggtcggtcatggtggaatgatctgtggttccaaggggcaggaggaggccagggtgctgggcccctggccctgcaaggctttggactgggcctgggacacactcctgcagctggccagcccagctctccagccctgggtggtgatgaagcagggcccgtctgcccagggcagggcatgactgggctgggaggattcccacttggagctgtgtccctctgagtgcagacctctgcctttcccgttcagcagggtagggctggggcagtgtgtccaaggtcagagcagaacactttgcaggatgacaggtaccacagtgggacacagcctgtgggcaggacggcatgggacctgcgccccagcaggtggccacaccagtgcccagcctcaccctgtagttagctggcgggaatctagtcggcgggggggcccaagtgccctgagagcccctcctgccagtttatttatattatattatattatattttatttcatttttgagatggagtttcactcttgttccccaggctagagtgcaatggcacgatcttggctcactgcaacctctgcttcctgggttcaagctattctcctgcctcagcctcccgagtagctgggattacaggcatgcgctaccacacccagctaattttgtatttttagtagagacagggtttctccatggtggtcaaactagtctcgaactcccgacctcaggtgattgacccgcctcagcctcccagagtgctgggattacaggcatgagccacagcgcctggcccagtttgtttatttattaaaaaaaaaaaaaaaaaaaaaaaaaaaaaacaaagaaaaaacattttttttgagagagtcttactctgtcccaggccgaagtgcagtggcaagatctcagctcactgcaacctctgcttcctgggttcaagtgattctcctgcctc[134 bp omitted]cggtctcccaaagtgctgggattacaggtgtgagccaccaggcccagccccttttggcagtttaaattctcgtcctcttgatgacacttatctaagtttttaaaacgtgcaaccctttagtctcataactgtctctgagaagtctctgtcctaaagatataggataagaatgatcattgtagggctgtttttaatggcaaaaagttggaagccctctaattgtctaacaattttcatctgtgtaaggacattatttgcatttattaagaatatctagatggacacagttgctcacactttgggaggctgaggtaggaggattgcttgaggccaggaatttgagactagcctgggcaacatagcaagaccctgtctctcctcacaaaaaataaaaattagttgggcaaggcggcacacgtctgcagtctcagctacttgggaggtgggaggatcacttgagcccaggagttggaggctgcagtgagccatgatcaggtcactaccctccagcctgggtgacagaatgagatcctgtctctaaaaagattaaaaattaggccgggcgcggtggctcacgcctgtgatcccagcactttgggaggcggaggcgggtggatcacctgagatcaggagttcgagaccagcttgggcaacatggcgaaaccccgtctctactaaaagtataaaaaattagcctggcatggttgtgggtgcctgtaatccctgatactcgggaggctgagcagggagaattgcttgaaccccggaggtggaggttgtggtgagccgaggtcacaccactgcactccagcctgggcaacagagcgagactcccatctcaaaaaaaaaaaattaaatattgaatattaaagtccccttcaactctcactcttgattcaaattctaatgtcagtgaggtcagtgctagcagtagatgtgccagatatagataatgtggagagcttgggtttagtgtggcttgggtccaggctgggtccacttcccacatccttgctgttggctgttggtcctgtgcctgctgccttgtggtttttttgttggctgcaacacctccagccctcacggcagcattccaggcctggagacggggcaggggtcaaggctccagggccaggccaactcacacagagttttgttttatggggctaaaaaacttctttattattaaacactcccttttgcaaaaatgcactgaatatgaatgtacagtttaacagattcttgtagagcatccttgcagccttcctgccgggcatagaaatagaactttgatgccctccggaggtcttatgcacccttcctagtcaaggctccctcttgcccccacattgacttttccagaagtcactgccttgccttgccttataattgtaccgcctgtgtttacatcactggaggttgtgtccatgtctctgtcttgttctacatgctgcccttctccccttggtgacatgtcctagccatctttctttctttttttttggaaatggagtctcactctgtcacccaggctggagtgcagtggcacgatctcggctcactgcaacctccgcctcctgggttcaagcaattctcccgcctccgcctcccaagtagctggggttatagccatgtgccaccacgcccagctaatgttttatatttttagtagagacagggttttgccatgttggccaggctgctctcaaactcctgacctcaagtggcctgcccaccttgggctcccaaagtgctgggattacaggcatgagccaccacgctcggccatccactgcgcccagcccctagccatatttctatgctggcacatggagcagccacctctgcatagggagccccatggctgtgccatgctgggggccattccccctggtggacggcatcggaggctcacggcactcccctcgcccaggttgccagaggaggcccgccaccggcgtgtgttcgagatggtggaggcactgcaggagcaccctcgagaccccaaccagatcctgatcggctacagccgaggcctcgttgtcatctgggacctacagggcagccgcgtgctctaccacttcctcagcagccaggtaggcagtgcccaggacatggcaggcgccatgttgctctcccagggccccaagtggcacatacacactgtgcagaggcatggggtgcaggcgatgggaacgccgcctcggtccagcgtgctgccctctgtccctctcctcttcctccatagcaactggagaacatctggtggcagcgggacggccgcctgctcgtcagctgtcactctgacggcagctactgccagtggcccgtgtccagcgaagcccagcaaccagagcccctccgcagcctcgtgccttacggtcagtgtttcacccgccgggcagggcccacccccagtgcctcctggattcaggtgcaggttgctcaattctgaagcaaactccagggccagagagggtaaaggctttgtccaaagccacacagcagggttcgcctcacccagtttcttggggaacttctcggagcaagattcccaagcacaggtctaccatgtggatgtggcatgagctagagggatctgtgcctgtggggactgacacttgtctgagagtttgaggatccgttcaagccgattcctttcctttcaggtccctttccttgcaaagcgattaccagaatcctctggctgaccactaggcaggggtaggtatccatgctggtcctctttcctctccagagccttcctggagggctagaaaggtcacttaggcctctgcctgggaagttggtgccagtgaacactctcaggtcccgtgttggggtcttggacaccagggaggggagacagggtagacgctattcacgtctctcagcggcccaattcctgccaagttcattcttgctcctttcttccaccttcccagagagacggtactgagcagcaggtcttaaactcctttagttggcagccctgtttcttcagacaaaatcactctgggtgatgttcaaacagaattggtgggggcacccagcatgaggcaggagtggctgctgagactcagagcccccagcctggatgccctcaccttacctccaagtcctcctgggctgtagcagttggaaggagatggggtccagtctcccctgctcctggggaccttgactgagtggtgactttgattgccggcctgtggctgttgaggctgtgccaggagccccagcccactgccgctcctctgtgcctgccaggttgcccttcaccatcttccagggtggcatgccacgggccagctacggggaccgccactgcatctcagtgatccacgatggccagcagacggccttcgacttcacctcccgtgtcatcggcttcactgtcctcacagaggcagaccctgcagccagtaggagagcttcgggagtgggtgcccagggttaggtgtgggaggcatggggcaggaccatcagtaaagacagggccaggtgcagtggctcctgcctgtaaccccagtgctgtgggaggccaaggtggtaggatcgcttgaacccaggagttcaagtccagcctggacaacgtagggagacccttgtctctacaaaaaataaaaaaattagccaggtgttgtggcacgtacctgtagtcctagctactcaggaggctgaggtgggaggatcacttgagcctgggaggtggaggttgcagcgaaccaggatcatgctactgtactcagcctgggtgacatagccagactgtgtctcaaaaaaaaaaaaaaaaagggctctgcacagatgttcctaagcctaccactgtcctgagtcccttagcctcactgcaccccaaggtgcagtgtcatcaagccctacagctcctttctctgcctccctgccaccctccccagctagagacccagcccagccacacctcctgtctgccccgggctctctgccctttccagactgtaatgggacttagcccacagggggctgatctgtactgttggatttaacacccaccccgctgaggcaagagggtcctggcttagagatggcaaagcccgccttctgggcagggcagaaggtggctgtgcagcctcctggagctccagcaggaccggcagagccctgagtcagcctcgtaaattgtgtgacaggcaagaccagaaagggctgatgttgaaacctggagaggagccctgcaggagctctccaggagggagggccctctcctaatgatgctggcctgaaagggcctgaggccgaaaggtgagggggcggggctgttcaggacacctggtctgtgtactcacggcctctatctaccctgttcaggggaaccccaaacctgcttttctttctttctcagcctctcctccctcctcacaccctggatgctgagagcagggcccagctctgctctttccacaacatttgggccatgttggcacagagcgggggcctcttgggctatggtggccacactccccgggctaactgagttacctgattcccagcggaaaggtcaggaagggagggaagaaacttgctgagctacaaattcgagactgctggggctttctaggacaggccaccttcctgcaattgtccctctgtgtccccaactccccgcagtcccgcaggccaggaggtgggtgcctgatgagcggtgcttccctcagatgatatgtgggcaccctgaagctctcacgtaatggttctgctgtgccgggttgtgacccagctgtccttggtaggctctcctgtttaatgagcaactgctatatgccaggccctgttctagaaacagatgaggcccctgttcccatggaacttagatctgagtatgtggacagagtgagtaggttgccagataatgtcagaggtaagaaaaaagccaggcagaggacagcagtgctggtttagacaagggttggcaaggcctccctgataaggggacgtatttgcgcagacacggaagcagtctgatggaaggcttgccctgtagggacctggggtgcagactgagctgggagggctcttggcttgctccaatgaggtaggggcgaagagagggcagaatggcccccgtgctggtccagatgtggccagcgccagatcgtatagagccgtggaggcacggtaaggacttggggtttgagggagatgagggccctgagcaggggtgccatgatctagcctctgctccagaaggatctgtctggctgccatgtgggggacacggagtggagcaaagacgggagcccagtgagagtcgagggagaggtgacctcagcttgggctgcggtgcaggccatgggactggcaggaggtggctggggttacgctgtcttttctaacattcagcattggctcaggggccaggtcagggctcacagactgttgctataaagggctgggtggctttcttccccacagctactcagcctaatgccattgcagagcacatgtagccatggacaacacaaggggcgtatccgtgttccaggacagccatattgacaggaataggcaggaggccagatttggtcctcaggctgtaatttcttggccccttgtctagggagaggtaaacgaggggaggagagatcagtcaaggatgacgtgagggtttgctgggagcaccaggaatcctggagaaggtagtggcaagagggtgcagcaagctcagctgggcggggatcaagtctgaggacttaatgtctcctctgatctccagacccataagggagatgctgagtagacaactggggcttatgggtctggagttcagaggagagatcgggaaggtgtccatttggagtcatccacgcagagatgtgtgaaggctgctcaatgattttgaggtttaaagaaaaaaagagatgtgaaaccaggggccctgatgaggctgcccaggtggtaaggaagacagaagagaagccatgggacagctgagcccgggcaccctcaagccttggaggcatgaagtttggtggggatctggcaaagaacacctgggagcagccagcgggcagcagaccccagagtagcagggaagacaagcacttcaaagaggcagcgtcagccaggggcagtggctcagctgtaatcctagcactttgggaggccaaggatggcagatcacctgaggttaggggttcgagactagcctggccaacatggtgaaaccctgtctctactaaaaataaaaaattagccaggcattggtggtatgtgcctgtaatcccagctactcgagaggctgaggcaggagaatctcttgaacccgggaggcagaggttgcagtgagccgagatcatgccattgcactccagcctgggcaacaagagcgaaactccgtctcaaaaaataaaaaagaaaaacaaaaattagccaggcgtggtggtgagtgcctgtaatcccagctacttgggaagctgaggcaggagaatcgcttgaacccgggaggcggaggttgcagtgagctgagatcgcaccactacactccagcctgggtgacagagcaagactccatctcaaaaaaaaaagagaaaaaaaagactgggcacagtggctcatgcctgtaatcccagcattttgggaggccaaggtgggaagatcacttgagcccaggagttcaacaccagcctgagcaacatggcgaaaccctgtctctaccaaaaatacaaaagttagctgggtatcgtggctcacacctgtaatcccagctacttgggagcctgaggcaggaggatcgcttgaacctggaggtggaggttgcaatgagccgagatcacaccactgtactccagcctgggcgacagagtgtgaaaccctgtctcgagaaaagaaaaaaaaaaaaaaagacaaatggtttaatcatccagcgcacatttattgagcactagctgggtccaggcctgagtgaggtgatgtgattgtgtgcagtaaagaaaatgccacccctagcaactggtgtgctgaagaccacgcgtgctgctgcctgtggggagaggcttgacaggtgcatctgagcagggagagcaggccccatggaggagaaaccagggaagagggttggcaggcacagctgcatgcctctggggtgcctatcctggttgggaccctgccttccagccaggtgtatccccccaggagccctgtgccagggagctctcagcagccttgcatgcagagccagggctactgcccacacctgctgccctcctggagatggaaaggctttgctcaagcagccaagaacagggctttctggatctgcagatgccctggctccaaccctggagcttctgattccacagagctgggctgcttcctcctggccccggcccctgacccttgccctgtaccccagcctttgacgacccctatgccctggtggtgctggctgaggaggagctggtggtgattgacctgcagacagcaggctggccaccggtccagctgccctacctggcttctctgcactgttccgccatcacctgctctcaccacgtctccaacatcccgctgaagctgtgggagcggatcattgccgccggcagccggcagaacgcacacttctccaccatggtaggtctggccctggccccagccccagccccaccgcaagccaaactctcccatggacttcttggtctctttttctaggagtggccaattgatggtggcaccagcctgaccccagccccaccccagagggacctgctgctcacagggtagggtactttgatgctaccccacctcttcccagtaggatatgtggggtgggagcagagccctgaggtggacgagccagcccctgggcatcccggctggcatccctctcacgcctggcaggtgggttctgcccacaggcacgaggacggcacggtgcggttctgggatgcctcgggtgtctgcctgcggctgctctacaaactcagcactgtgcgcgtgttcctcaccgacacggaccccaacgagaacttcagtgcccagggcgaggacgagtggcccccactccgcaaggtgaggccaggagcctgggacccaggaagggcagaggccagctgggtcctgtccccgtggctgctcacagggcccctccccttctccaggtgggctcctttgacccctacagtgatgacccccggctgggcatccagaagatcttcctctgcaagtacagcggctacctggctgtggcaggcacggcagggcaggtagcaggctgggctggggagggggagctggggaggagtggtcgatgactggggacagcagggacaggagccaaccacctgcctaacgcacattctgtgtcctttgcttttccggtggatggaggtggcttgatccccttggcgggaggtccctgggatggttgtttcttctccagaaatcggaattaagggctgggccgggcacggtggctcatgcctgtaatcccagcactttgggagaccaaggcaggcggatcacctgaggtcaggagttcgagaccagcctggccaacatggtgaaaccccatctctactaaaaatataaaaattagccaggcatttgtggctcgtgcctgtaatcccagctactggaaggccgagacaagagaatcacttgaacctgggaggcagaggttgcagtgagccgagattgtgccactgcgctccagcctgggcaacagagcaagacttgtctcaaaaaaaaaaaaaaaaaatgcaggagagctggggttggacagaggcctttgtccttccttgagccttgggcccagctcctttgctgtccccactagtagcatcctgcggccctgccgtccctttgctgagggcttgctgagccacctgccaccctgcgcaggtgctggtactggaactgaatgacgaggcagcggagcaggctgtggagcaggtggaggccgacctgctgcaggaccaagagggctaccgctggaaggggcacgagcgcctggcagcccgctcagggcccgtgcgctttgagcctggctttcagcccttcgtgttggtgcagtgtcagcccccggctgtggtcacctccttggccctgcactctgagtggcggctcgtggccttcggcaccagccatggctttggcctctttgaccaccagcagcggcggcaggtctttgttaagtgagcaggggcggctgggtcccggggctgggagtggggcccgcgaggactcccaggacctagcagcactgacagcctgccatccccccaaggtgcacactgcaccccagtgaccagctggccttggagggcccactctcccgcgtcaagtccctcaagaagtccttgcgtcagtcattccgccggatgcgtcggagccgggtgtccagccggaagcggcacccggctggccccccaggagaggtgaggcctgaggtgaggctgcggccggccacgcacccaggttcggctcagagcagccagcaggggggccacacggcccctgctccccaggcttgctaggctacaaacaagattcagggtccaggtcgcattgtgtgacctcagacaggtcacgctgcttctctctgcctcagcttcctgagcagaaaggcagtaactgtaatgcttatcctagaagtaatccccagtaaacgttagtgatttcctttttctctctacaacatgctgggggcccaggcaggctcccccaagggcacctccctcttggacaagggtccctctagacgcaggcctggcaggtggctggcatggctgtggcctgccttccgatgcaaggatcagcactgagcgaagcactgttcctggggaggggagtccagagctgacccttaggctggcccaccccttgcaggcacaggaggggagtgccaaggctgagcggccaggcctccagaacatggagctggcgcctgtgcagcgcaagatcgaggctcgctcggcagaggactccttcacaggcttcgtccggaccctgtactttgctgacacctacctgaaggacagtgagtggccagcctggggttggggggcagggggtagtgggcagcagacaccccctgacctgggggcatgccgggggctgctgcctgcctggctggtaggagctaagaggtttccccttgtgagcaggggcagactgcagcccctgcctgcttactcccctcccctgcctcagcctctgagtcagcttcccttggctttatatccaggccgtagcaccctttagaagcatggcctcagacccatcacttagcctttcagggcctcagcttgcttctctgtaaatgaggaagtgacagcttcctcctagagcagctgtgacgatcggggacagcagagcctgctggtctccagatgacgtgtctctccctggctggttctcccctgctgtatcacagcaagggctgagctgacctgggattggggtcttctatgttggggcctgtgtggttgtcagagagccttccagcctctcccaggagggaaaacctgggagtaaaccctggttgcccagctccacccgactcccacgctaagggtcagacacccaaacatggcttctcggcaggctcccggcactgcccctcgctgtgggctggcaccaatgggggcaccatctatgccttctccctgcgtgtgcctcccgccgagcggagaatggatgagcctgtgcgggcagagcagggtgagtgctgggcagggagagcagagggtgctcgggctgcctgggctgggtccagggagtggctccagccctgccaccccctcaccagccccaacacccacctcctccccctagccaaggagatccagctgatgcaccgggcgccggtggtgggcatcctggtgctcgacggacacagcgtaccccttcccgagcccctcgaagtggcccatgatctgtcgaagagccctgacatgcagggaagccaccagctgctcgtcgtatcagaggagcagttcaaggtgccacacgggcagcggcgggtctccctgggactccccgggacatccaggaggctcggaccttgggcaaaaatgatggctgggactcagtcttgtttgcagttggtgtctgaggggctgcagaagtacaggaaataagtgaggggggagtctcgtgtgaggacactgaggcaggacagggggccaggcgcggtgactcatgcctgtaatgccagcactttgggaggccagatcacaagggcaggagttcgagatcagcctggccaatatggtgaaaccctgactac[136 bp omitted]cccgtctctacaaacaaatgcaaaaaaattagttaggcgtggtggcgggcacctgtagtcccagctactcaggaggctgaggcaggagaatggcgtgaacccaggaggcggagcttgcagtgagccgagattgtgccactgccctccagcctgggcgacagagcgagattccgtctcaaaaaaaaaaaaaaaaaccagcatggtggtggacgcctgtaatcccagctctactcgggaggctgaggcagaagaattgcctgaggcggaggttgcagtgagccgagatcacaccactgtactccagcctgggcgacagagcaagactccatctcggaggaaaaaaaaaaaaatccagatagggaagtcggtgacctcggcatcctcccaggccatgtctgtgcatctgagagccaagggtttgtcaggacaccgggaggcatgtggggaggggagggcccagcagcagcagcacagggcaggagaactggtttggccatgggcatgaacaaccaccccacgcccccaggtgttcacgctgcccaaggtgagtgccaagctgaagttgaagctgacggccctggagggctcaagagtgcggcgggtcagcgtggcccacttcggcagtcgtcgagccgaggactacggggagcaccacctggcagtccttaccaacctgggcgacatccaggtggtctcgctgcccctgctcaagccccaggtgcgctacagctgcatccgccgggaggacgtcagtggcatcgcctcctgcgtcttcaccaaatatggccaaggtgtttgagccgggctgggtgggtgtcggggccccgggcactgcacggacgggaagggtggccaggggtgttgtggccacggccagactggatgggccttaagcggagaactgcgagggagcactagcccctactcccccaggtggggaggcagccttggcagccgccaggccaggccgctagcattgcccccactccccaggcttctacctgatctcaccctcggagtttgagcgcttctctctctccaccaagtggctggtggagccccggtgtctggtggattcagcagaaaccaagaaccaccgccctggtaacggtgcgggccccaagaaggccccgagccgagccaggtgagtgaaagggccagaggcctctcccgcccctcccgcccctccctgccctctctgagataccgaggctcccactgctgcctggctggaggcacctccccacgagctcagcccaccctcccaggctccggctctccttgcctctttgcgtgccccttgcccctgtgcaagctggcagtccagggcaggactcagtttacctcccaggctctccggctcaggacaggctgcgccattgacttgttcttcatgggaccagggctctcagagccgggcagggagcccgggggccctggtcctcactgtctcttcccccacaggaactcagggactcagagtgatggcgagggtaagacaggcctcctgggctcatgcacacctgggccacacccggcccagacctggggctggacgggagggaagggtcccgagtgagcaggtagtgtttgggctgggaatagagacggcattccttccagccctgggccctgggcttccacatcctgacctcagtaaggagagagagagccaggccgaggagggcccaggcggggcgccctgacccggcctctaccttccagagaagcagcccggcctggtgatggagcgcgctctgctcagtgatgagagtgagttgggtgggagagggtggggctggcaggaggggtggggaaggggggtcagggtcaagggaggctgggcaggccactgccctgaggcggggtacagatccatgggcacccacggagaaagggggtggaagggctgtggctagccgccccaagggcctcagtgggcctctgttcccacccggcctgcaggagtcctgaaggaaatccagagcacactggagggagaccgcgggtgaggcaccgcccaggccagctggggtgggcccgaggctctgccagagggctcaggggagcgctgagagtggaggtccctgaggccatgactcccctgtctttgcctgtgcaggagcggcaactggcgttcacatcgagccgccgtggggtgcagcctcagcaatggcggaggtgggggctctgggcttgagtgcagctgccaaccgtgctgggaagggctgggaggaagagccccggccccactcccctgggtcccacggggctgacacgtgccctgatgaccaggaaagcaccatgtctgggctcagcgtgggcggctggggcaccccgtcctgcccagggtgatcttgagctgtccctctgtgtccttcagcagagtgagtggctgagcgtccaggctgcgcgatgagcacacactactactgatggcctttcgggggtccctgccccaaccggagaggccggtgcacagggccccgccaggggctgggggcatcccggcttccacaatgcagctgctctgggcctcgggagaggagagaccccagtcccctgggctgcccttcccgggcctcgtctgtctgggtcctttggtcaatgttgcacagtttttattgctcccatccctttttgtagtgggctgggttttaagttataaatgttaactgcctctgggtgaaaaagtttttaataaacacctattacctcttgactggtccactactttaatattttaattgtgtagaaattttccatgtgaatggaaagtgggagccggtaccctgcctgtcccccgaggctccagccctggcctgggccggtgtcaggagaatccacttggggagccgtgtgaatcaaactgcttcgttttgtctgagcccggcggtgccttccctctgtgggaacacatggcaagcacgaaccatcttgagtctgcctgactttttccctgggtcctggccgcccctggctggcctttccctactgtcagaagaaggacacccacaatatctcagacctgatggcttcctccagacaccagggaggactgtggggtgctgctgaagcggggctggtacccaaggagaaaggccttccccaggggaggggctgggttatttagattggacatgggctggatctttattgactcgtcttcgttgagcacctactgtatggccagtgcgtggggttctccggtgtctgagacaactgtggttcctgccacagttgacactggtgagaaatgcacctggggggtgacctgagagagaaccaggaattgccagagagtgtggtaagcaagcagattgttccagacagaggacaagagggctcaccgccactccaggaactcgcttgccgtgggaggcagtggagagcggaaggtggctggcaggcagggccgaaagtgaggccagactagggaggcccagtgagggccaggtgtgacaggcgcctgctctgcgtgagcgaggaaaggcccatccagaggagctgggtacaggtgttccatctggccatgtccacctcgagatggccacttgaccgtcccttgtttccccaggggagggtgcagaaagacttctgagatgagcacctcgagaactatgaggaatgtaggggagcagttccccaaagggagaggaacaccatgctagaagaagcagggaagggatgatgcctggcagagaccagccacaggggtgggggatacctggtgagacacctgtatcagtcccttcccatactgccataaagaacatatgccataaaggtggctgggcgcagtggctcacgcctgtaatcccaacactttgggaggctgaggtggggcagattacttgaagtcaggagttcaaaacgagcctggtcaacatggtgaaaccctgtctctactaaaaatgcaaaaattagctgggcgtggtggcgcgcgcctgtagtcccagcactttgggaggccaaggcagacagatcactggaggtcaggagttcgagaccagcctggccaacatggtcaaaccctgtttcttctaaaaatacaaaaattagccgggcgtggtggcgggcatctgtaaccccagctactcaggaggctgaggtgggagaatcacaaacctgggaggcagaggttgcagtgagccaagatcgcaccactgcactccagaccgggcaacagaacgggactccatctcaaaaaaaaaaaagataatggtgatgatgcaagtaccagtgaatcagaaaaaaacggcagaacctgcacttctgtggcacagaggagcctggtggccacagcacaggtcttgctgatgaaattgaacaagaagtcgaaaacacacagccctgaaaatatcaggaagactccgaacatgaacttatttccttgctgattagtgctgaactttgagctttgctgtaagtatgctgtgctttgaagtattagctaatgtcggtgtgcatatttcagtttaaggaaacattctcggccgggcacggtggctcacgcctgtaatcgcagcactttgggaggccaaggcgggcggatcacgaagtcaggagatcgagaccatcctggctaacatggtgaaaccccatctctactaaaaatacaaaaaattagccaggcatagtggcgggcgcctgtagtcccagctactcaggaggctgaggcaggacagtggggtgaacccaggaggcagagc[132 bp omitted]ggtgtgcaagatggaaggacgtgg[211 bp omitted]gaggcaggagaatctcttgaatccgggaggcggaggctgcagtgagccgagatcatgccactccattccagcctggggacagagcaagactccgtctcaaaaaaaaaaaaaaaatgaactggaggaagctgggatccccacagccatccagggcaaggcgacggtggtagggaaatagaggcattgaggggttgggttgacaaggatggctgccagatgggaggagatgagtgagcgtgagggctacctgttgcctccaagggccagggaggtatacagcaggcaactggatttgtggtcaggagatttattttatttgttttttagagacagggtgtcactctgtcacctagactggagtacagtggcatgagatcatggctcactgcaaccttgacctccgaggctcaagcaatcctccagcctcagtcatccaaagtgctaggattacagtcataagccactgagcctggccacggaaattgatttattttagagacagagtcttgctctgttgcccaggctggagtgcagtggtgtgatcatagctcactgtagcctgaactcttgggttggagcaaacttgtagctgggaccacaggtgggcgccaccatgctcagctaattattattttttttcaagacagcctcattctgtcgcccaggccagagtgcagtggcatgatctcggcacactgcaatcaccgcctcctaggttcaagcaattctcctgcctcagcctcccgagtagctaggattacaggcgttagccaccacgcccagctcatttttgtatttttagtagagacagggtt[145 bp omitted]tatattgccccaggctggtctcaaactcctggtctcaaaggatactcctgcctcagcctcccaaagtgctgggatcataggcatgagctgccacaccctgccagtctgcagattgagatgtgagggtcttgggcattcaaagtggtggagacctggtgttcatttagcatttgaggccaggcagatccaaccctgtacactggctttcacgtgactggctgtgtgaccttgggtacatgacctcactcccataccttggtttacttatctgtaaagtgaaggataataataggacttacctcagagggttgtaaaggattaaatgagagcctgtaaaatcacacagcacctgattcctagtaaacacccaaccctaggaggtgaaagttactgtggatggtgggtgaggccaggagagaaggagatggctccagagggagggagtgtggaaggaagtccagagagggcgcggcacacagccccagggaggagctcactatacactggtgagcgaagcaggcaaaggaagtcagtgggaaagtgggaagcagaggggagagccaggctcgggggtgtggcctgtctccctgcatgtcaagattagccaagctgttccctgaaggttgttcaaggtcatagagccaggagggtggagcactgcagctgggatgggggaccaaggctgtctggttccaaagctgattccagcagaagcgctgcggagctccacagtgtgggttcagcagaaaagtgggtattaaaggccagagggcctgggcttggtcctcaagtc[136 bp omitted]ctgcctcagccttctgagtagctgggactacaggtgcatgccaccatgcctagctaatttttgtatttttagtagagatggggttttaccatgttggccaggctggtctcgaactcctgaccttgtgatccgcccgcctcagcctccc[131 bp omitted]gctccatctcccagattcacgccattctcctgcctcagcctcccaagtagctgggactacaggtgcccgccaccaagcccagctaattttttttttgtattttttagtagagatggggttttacggtgttagccaggatggtctcaatctcctgaccccatgatccacccacctcagcctcccaaagtggtgggactacaggcgtgagccaccgcgtctggccttaaactacttcttaattttgtttttatttttattttaagaaacagggtctcgctgtgttacccaggctggagtacagtggcacaatcatgggtcactgcagccttaaacttctggcctctcacgatcctcccgccttggcctcctaaagcgctaggattacaggcacacacctggctccttaaactacttaacctctctgagccattttatcatctgtaaaatgggatcctatttcattcctagggttagagaaggtttaaataaaatggtacttggttaggaaactgaagctcagagggtaagcctgccacacccactgagctgagcaagatacaagccccagcctgggtcagcagaaagaagaggcacccaggccgggcacagtggctcacacctgtcctgtaatcccagcactttgggaggccgaagcaggtggatcacttgaggtcaggagttcaagaccagcctggtcatcatggcaaaaccttgactctactacaaatacaaaaattagccagacgtggtggcgcccacctataatcccagctacttgggaggctgaggcaggagaattgcttgaaccgggaggtggaagttgcagtgacccaagatcacgccattgcactccagcctaggttgacagagtgagactccatctcaaaaacaaaacaaaaaaataattagccaggcacggtggtgcgcacctgtagtcccagctacttgggaggctgaggcaggagaagattgtgtcactgcactccagcttgggcaacaacagagcaagactcaaaaaaaaaaaaagaagaagaagaagaagaagaggagggcacccaaagggacaggagattggacaggggctgcgcaggagcctccccgacgagcgccaccccgcgctccacagccacccaagggctgaggagtgcgggtgcacggcgcgggactggcaggcagctccagctgcggccctggtactggatccactgggtgaagccaactggtctcctgagtctggtggggacttggagaacctttatgtctagctaagggattgtaagtacaccaattggcactctgtatctagctcaaggtttgtaaatacaccagtcagcaccctgtgtctagctcagggtttgtgaatgcaccaatcgacactctgtatctagctactctggtggggacttggagaacgtttgtgtggacactcactctgtatctagctaatctagtggggaggtagagaactttcagtgtctagctcagggattgtaaacgcaccaatcagcaccctgtcaaaacggaccaatcagctctctgtaaaatggaccaatcagcaggatgtgggcggggccagataagaataaaagcaggctgccggagccaacggtggcaatctcctaggctttgtggaagctgcgttgtttttgctctttgcaataaagcttgctgctgttcagtttttgggtctgcactgcctttgtgagccgtaacacccattgcgacggcctgcagcttcactgctgaagccaatgagaccacgaacccgccaggaagaacgaacaactcaagacgtgccgctttaagagctgtaacaccgtgaaggtctgcagcttcactcctgagccagcgagaccacgaacccaccagaaggaagaaactccggacatgctgtctttaagaactgtaacactcaccgtgagggtctgcggcttcattcaagtcagtgggaccaagaacccacgaattccggacacagaagttccctctgtgttaacatttacaaggaaaaccacccatctgggctgagctcagtggttcccacttgtaatcccagcactttgggaggcggaggagggcagattatgaggtcaggagaccgagaccagcctggtcaacatggtgaaaccctgtctctacaaaaatacaaaaattagctggctgtggtggtgtgtgcctgtaatcccagctactcggggggctgaggcaagagaatggcttgaacctgggaggcggagattgcagtgagccaagatcttgccactgcactgcagtttggcgacacagcgtgactctgtctcaacaaaacaaaaaaaacacccatgtgctttctgttctgtgtctgtttccctcactccttttctgtctataaaggtaggctcctctgctcagctggtaagaacattcaattttatataattctattttatagaatgaggtgttgcctgattctagaatcacaagtaaaagccagttaagtttttttttttttttttttagatggagtctcgctctgtcgcccaggctgcagtgtactggtgtgatatcagttcactgcaacctcctcccgggttcaagtgattcttcagcctc[134 bp omitted]agcctcccaaagtgttgagattacaggtgtgagccaccgcgcctagcctgccattgaagatcttttaactaaacgtgttgtaattttttttgatacttctcccacacccattctccatctgggcctttggagccagactgcttgagctggcatccccgctctgacagtccctaggtgtgtgcctccgtggtatcatccctagaatgaacatcctcatagcaccttcttcttacagtgctctcaggattaaataaattcacagaaaagtgcttagatcctggctaacacggtgaaaccccatctctactaaaaatacaaaaaattagccgggtgtattggtgggcgcctgtagtcccagctactcaggaggctgaggcaggagaatggcgtgaacccaaaaggcggagcttgcagtgagctgagatcgcaccactggactccggcctgtgcgacagagcgagattccgtctcagaaaaaaaaaaaaagggcttatggcatgccttgagcataagaagccctgaggtgctagctatctgctactattatcgttattgtttgtccagggcaaaactgagctctctggccgggtattggggctcatacctgtaatcccagcactttgggaggccgagacgggcggatcatgaggtcaggagggcaagaccatcctggctaacgtggtgaaaccccatctctactaaagatacaaaaaattagctgggcacggtggcatgcgcttgtagtcccagctactcgggagtagctgagtgacagaataagactccgtctaaaaaaaaaaaaaaaaactgagctctttctctatgctgttttaattttttttgtggttttggttttggtttttgagacagggtcttgctctgttgcccaggctggagtgcagtagcacaatcactgctctctgcagcctccatctcccagacttaagcaatactcccacctcagcctcccaagtagttgggactacaggcgtgtgccaccatgctcagctaatattttttttttttttttgagacggagtctcattctgtcactcaggctggagtgcagtggcgcaatctctgctcactgcaacctctgcctcccaggtttaagcgattctcctgcctcagcctcctgactagctgagattacaggcatgtgccaccacacccagctaatttttgtatttttagtagagacggtttcaccatgttggccaggctggtctcgaactcctgacctcaagtgatctgcccacctcagtctcccaagagctgggattacagacatgagccactgcacctggcctccagctaatttttgaaaattttttgtagagatggggtcttgctgtgttgctctggatggtctggaactccgggatcaagcaatcctcagcctctcaaagtgctgagattacatttgtgagccaccatgcccagcccactgtgctataagatacaaaccaggctgggtgcggtagctcatgcctgtagtcccagcactttgggaggccgaggtgggtggatcacgaggtcaggagtttgagaccagcctggcctatatggtgaaactccgtctctactaaaaatgcaaaaattagccgggagtggtggtgtgcacctgtagtcccagctgctcaggaggctgaggtaggagaatcacttgaacccaggaggtggaggttgcagtgagccgagatcgcaccactgcactccagcctaggcaacagagcaagactccgtctcaaaaaaaaaaaaaaagatacaaaccaacagtgcacaagtcataggagaacgactcagcaaatccccacaaactgaacaaacgcatcacccatatctcagagcttcccttgtgtctcctttgagtcactactgaccctggagggaccactctgtagatcactttgcctgtttttgtactttatataaatagaacgcagtggatgctctttcatgcctggcttccttcactcaccattatgcttgcaagattatccacattgttgctgacagctgtagacagttctcaatgctgtgtactaatccaccgggtgaatacctcacccacgttctgcttcttgcaggagaaacgagtgctcagactataatcatcctttgccccagcacaactggcgataggggagtacagcttgcagacatctacaggctgcggttacctgtgagctcgtagtccttctaacagctgcctccctctccagaaggctgcctccttgagaatgcaggctgcaaaggccaaatcactgtcaacttgttgctcaaaccaggcctctgggctgtgaacagccctctcgggcaatgtgggtgctggcaacagctgcaaccatgtctaaggctggttctaggaggtgtgcagagagatgggcacaaggcaggcgtgggctgacaagggcattccgaaggaaagtgctgcagtctggaatgtcacctcccctgctctgtgctgggtgctgctcctggtgaggaaaggccacagcaaaccggtcagtgggggcatgggagtccctgtggggcacgtcacaggccccacctggacgacccatctgactccatcgtgggtcctctgagcctgccccagcacagctgccttgccccagggccctcaagtagcctcacaaatcctgcctgggtttaacagtctaataatcaagaaactcctgaccgggtgaggtggctcacacctgtaatcccaccactttgggaggccaagggcggccgatcacttgaggccaggcgttcaagaccagcctgggcaacatggtgaaaccccatctctactaaacatacaaaactagtagggcatggtggtgcacgcctgtaatcccagctacaggctgaggtgggaggatcccttgaatccagaaggcagaggttgcagtgagccgagatcgcgccactgcactccagcctgggcaacagagcgagactccgtctcaaaaaagaaacagaccttctcacacccaataaatagagagatggggaaggatgagaagagagtggtctcagaaaaggaagtaaagtggctctaagagcaggagagctgcttattttcacagataaatgaacttaaagaggcaccgagtttttttttttattttatttaaaaaaaatttttttgatacatattagatgtacttattttgggggtacatgtgataatttgatataatcaaatcagggtaattggggtatctgtcaccttttctttttctaatactaggagcatttgaatcattctctgttgtggtaatcagatccaacaccaggtagtgggggtgatgaagtccggcagagtcaaaggaatgagaaaaagacagtttgagagagaaagtgggaccaggggaccatcgcgagtgtggaggctgtgaaggcccctgggcactgggagcccaggctatttattggtgctcaaagaggtggtgaggatgtggaggttgaaaggaaatagtgtatcaagtgaacgagaaacatacagctgcttgagataatgggagtgctagaagcaaggagccagcaagtctagcagacatgcaagtcctgcctgagcttctctcccaacactcagcttttctcccaacaattctcttctagctatttggaaatgtacaatcaattaatgttatctatagtcatcccactgatctattgaacactagatcttatttcctcaaagtggcactgaaattttgtcatgtttcagagtgttggaaaagaatggtggtctcccattattggtggcaatataaatcggcacaacctttgtggagaaaaatttggaaatctcaaaattacaaatgcaagtgccctatggtgcagcgattctacttatagttgattctatgcagatgctggtgaaattgtattccagtattggctgtaacttaagcaaaagatgagaggaaggaaggatccacctttttttttttttttttttttttaagagagtgagtcttgctctgtcacctaggctggagtagggtggaacaatctcagctcactgcaatctccgcctcctgggttcaagcgattctcttgcctcagcctcccgagtagctggggttacaggcatgtgccaccacacctaggtaatttttgtatttttagtagagatggggtttcaccatgttggccaggcagatctcgaactcctgacatcaggtgatccacccacttcggcctcccaaaatgctgggattacaggcatgagccacctcacttggccaggatccactttggatgtagaaacccatcaataaggaattggttcaaccatggtgcatttatttgcaaggaagagagggaggagagaagggaggaaggcaggctggctttttatggtattattatgaaatcaccagattacattgttaagtgaaaaaggcaaagtggagaccccggagctacataagctaccacttgtgctaaaggggaaaaatataatatttgcttttctctgcatggaaagtttttgttgttgtttctttgtttttgagacaaacaaaatgctgtcacccaggctggagtgcagtggtgtgatctcagctcactgcaagctctgcctcctgggttcatgccattctctcctgcctcctgggttcatgccattctcttgcctcagcctcccgagtagctgggactacaggcgccccccaccacgaccggctaatttatcgtattttttagtagagacgggggtttcaccatgttagccaggatggtctccatctcctgacctcgtgatccgccctccttggcctcccagagtgctgggattacaggcgtgagccaccgcgcccggccaacctggaaaattttgcaaggaaatacagaaatgggtaacctcaggggaacactgagtacataggctgagggtcaggaatgggagacttttatcttgtaatgtttggatgtttgaattatgtgaatgtattacctgttttaaaaatagatattttaaaaacacacacattggggcaatcaggaatgtatggggtgtggttctgttccacaactccaaggaggtagacaggcatgttttacaccagttcaagatgtacatttatgttttatgtacttttcggtaaattgtatttattccacaattgaaaagaacaaaaaccctagcgactcatggagtgctgccgtgtgccagggtgggcctggccccagtcccttggaaccctcagaaggaagaagtccagacaggttctctgggcccttccttgctgggcaagcactgaggtgggagtggagcatggaccccctcagtctggcgcggtgcgaggctggcctggctggcagcgcctcccggcggcactgttgccctgtccgcagctgtagcgtctcctgtttcctgggcgcctctattccattgttggccgagggggtcaggacccgccgccttctgcattattgatggtcctgtaaggcgggcacctcggggagtagagcctgtagcccctgcgagagcagagccgggtggtgcactgcacagaaggtcaccgcgggaggccaaatccccggggaggggaaaggacctgggcgtcgggaagcccgtctcctttgggccagccatgggcaggaaccagcgcaaagcgccccagcgcctggagaggcccgggaggccggcctcaggggagcaggagtcggggtcggccagcgcggatggcgcgcccagccgggaacgccgttccgaccgcgggcaggcggacagggcgaaaccggcggccgagcctgccaccgccgggggccagggaacccctggtggccgcaggaagcccactgcagaggggaacggcggctgcagacgcccaggggctgggctgtccccgaaagcccaggagaggcaaagcaacgcgcagcgtcagggacgcgggcccaggggcggccgcggggggcgcctggaggagggaagcctctccggaggagaagagctgggcggccgccgtaggaggaagcggaaagataaggggccctcggctcggcggggccgccggacgcccaggagcctcaatggggacacgtcgggtggggacggaggcagctcctgtccggacagcgaaacccgcgaggcccaggagagcggcagccagcgcggcacagcccgggagctgcggcccacgccggagcctacggacatgggctcggaagggacaaaaaccgggccggagtcagcgctggagccaagcagcgacggcctggacagcgactggccccacgcagatacccggggccgggaagggtcgtcggggacggggcccctgggagccagcgagcattccggcggggactccgactcgagtccgctggggaccggacctggacggggctctcgggcagctatggcctccaggaccttcgaggacagctcgcgggctcctcgggacactgggccggccaaggacgcgagcgacaaccgggcgcagcggggcgccgagccagaaacaatgcaggcctcgacggcccgggctccgcgccaccaggtcggaaaggcggtggggcaggtgccagcggcggcaggcgagggcgaagcgggagccgcagcaggagcggggccggaggacccagccccgctggcggccctcctggtggtccgcaggctcctcgcgaggcccccgccaggcgccgcttcccaggccgtgggcccccgccgcgctggcctcaaggagcggctcctgagtgtagcgcgagccctgggcctcctgcgctggctgcggcggcggctgcggctgcggcggcggccgccagagggcgaggggcagggtaccgggccacgggcgagcgaggggtggggccgccggaaaccggacgaggggcggggtcatgggagaggaagcaaggggcggggccgcgggaaagcggatgaagggcggggccacgagcgaggggacgagggtcggggccgcgggaaagcggacgaagggcggggccacgagcgagggtacgaggggcggggctgcgggaaagcggacgaggggcggggtcacgagagaggtgacgagggccgggaccaccagagagggtacgaggggtggggccgtgagcccgggctgcggcaccgtctagcgttgcgcctggctggcttagcagggctggggggtatgccgagggcttcccctggtggccgctccccgcaggtcccgacaagcccagtccccggcgacccttttgatcaggaggacgagactccagatcccaagttcgcggtcgtgttccccaggatccacagggcagggcgggcgtcgagcagccgcagctctgaagaagcgtccgcagatgcccccacgggggaaggccgaggttggcctcgtgcaggggtgggggggcacagtgaggggtgcaggacgagtggggaaggggtgtccgggcttcgtcgcggctccctccttgccccgactgcacccgacgggccttccctcgacgagagcggctccagcagtgaggcggagttggagaccctcaatgacgagcccccggtgcgctgggcgcagggctcaggcccccacgagggtcctaggcttggcgccgccgtgctgctaccccgactctccttggagacccgcctgcagcaggagggagacccgggcctccgtgggtccctgagggagctgtgggaacccgaggatgaggacgaggcggtgctggagagggacctggagctgagcctccggccgggcctggaggcgccacccttccccggtgccaagggcaggagcctcggagacggcctggaagacatggaggacctggcgcggttgcggttagcgggcgcggtgccaaagctgccatccccggctcacagctcctcatatccaccctgccctcatctttatgaattgcgtgtagacccttattgaatccttagaaggatgggcttgaaccctcctggcaggaaggggcaggtaaggggcaacaggtgctacgtccccaggaccgcctttctaattagtacaaagcttccttctgggtcagagccagccctccttgtagcctgcgcattacttgacagctcagcccccattttatggatcaggctctgggaagttgaatgacttgccagggtccctgcagtgggtggcagaactaacccacaacctcctgcagccacaacttgtcatgcctccaccctgttgtccctacaggctggtgtgtgacagctctgtgctgctgtgcctcaagaagagatttcacctgggccgtatctatgtatggggagccacggggacggacagtgggcggggatccccttttctctggggacagagggctccctggcacccctggagattctccttcctcttcctccccgggctaggcggtgaaccctctctggagccctgcagagtgggactgaggggctgggctctgtttgcattccccctgctccctccacactctgatgagagcttgttttcctccccagacctttggggggcctgtcttgcttgttctgaacccccaccggtccttgcctcttttttcacctgaggtccaggcaagctaccaccccaggaaggccctcagcaccactccgtatgtgactctgccccactgaccctctgctcacctcccaggcagcccagtccctgcatgtccccttgactgaggtcccggggcctgtgagcacctctgctacacctcggagggtcccaggtccccatgtctggcaaccttctcatctccctcagacacatctttgccatcgtggcatcagcctatgacctggctcagaatactgggcaggacccatgcatcctcctgtggtgagtggtggccttcctgggtggctgaacccatgggccacactgagggttgatggggcggggcctgaggtcttcactggaagccactggtatgctccactgctgggctacagttctggactcctcagggccgagctcctggctgaaatcatcacatgagcccctggaatgtggcatcttggggactttttcttttctgtcgggtctctccatgccctgggactatctttccacatttatgggggtctctccaggctagctgtcacttctgggtggcacatcccacttcctgggttcactggggtggtcctatgtgcccctccctggagaccctaccaaccaacacatccttagctcctcccactgcagtgggcacagtggctcagggaagacggaagccgccaaaaagatcatgcagttcctaagcagcctggagcaggatcagacggggaaccgagagtgtcaggtgagggccaggctggaggtacctcatgggttgagctggccgtctgtcttcctccaggggacagctgaccatgtccaagggactatctttctcctttcagccaggagaggggtggtctccaggcctctggcgtctcctggggtcagctgcaggcactgccctttctgatgggactgacgcctccctggacctgcccctagctgggatgcctgctggtgggggctactgctgcccagggatgcttgaacacccctccctgtacaggtggaggatatgctgcctatactcagcagctttggccatgccaagaccatcctcaatgccaatgccagccgcttcggccaggtcttctgcctctacctacagcagtgagtggcagggttgcagggggcacctacaatcacttacccttcctgggtccttgggctgcttccctggggtccagaccctggtagggcttcttctgcacggggcccctgggtgttctgcatcctgggcactcacacccatcttctgtgcccacagaggggtcatcgtgggagcctctgtgtctcattatctacttgagacctccagggtggtgtttcaggtaaaggcagcccttctatccacccctgcccagttcccagagtaggaagggcagagggtgtcactgtcggggtgtggcctctaagcccctagggcactgagcccctaagccagtcctgtccccaaggcccaggctgagcggagcttccatgttttttacaagctgctggcagggctggactccatagagcgggagcggctctccctgcagggaccggagacttactactacctcaaccaggtcgggggagcccttgtggtgcggcggggaggcctgcccagaggaggatctcggcccggaggtctgaggagtagccggagtagagggaggctatggggtggcaggccccgctccctcacccctgctgtgctctgcagggccaggcctgcaggctgcaaggcaaggaggatgcccaggactttgaggggctgctgaaggcactgcaggggctcggcttgtgcccagaggagttgaatgccgtctgggctgtgctggccgccatcctgcagctgggcaacatctgcttctcctcctcagaggtgggcttccccgtgggcaggggccatctggggtgctgggtctgtagaatcagggcagtggtaatgacgccaaatgctggtgtgtaggagactacagagtgctgggctgccctgaaaagtgggtagatccccactgtgtagatgagaaagctgagacatagagcttctccactctcccaatgtctgtgcctctaagctgccacccctaagaacatctggcattagatgagcagctatggtcaggcatggtgggtcacacctgtgatcccagcactttgggaggccgaggcaggaggatcgtgtgaagccaggagtttgagaccagcctaggcaacatagagaaaccccgtctctattaaaaaaaaaaaaaaaaaaaaaaagggttggcggtggtggctcacacctgtaatcctagcactttgggaggccgaggtgggtggatcacttgagcccaggaattctagagcagcctgggcaacatggcaaaatcttgtctctacaaaaaatatgaacagattaggccaaggcgagcagatcacttgaagtcaggagtttgagaccagcctggccaacatgctgaaaccctgtctctactaaaaatacaaaaattagctgggtgtggtgacacgtgcctggatgtggtggcacatcccagctacttagagaagctgaggcaggagaattgcttgaacccgggaggtggaggtggcagtgacctgaggttgcgccactgtactccatccagcctaggtgacagagcgagactccgtctcagaaaaaaaaaaaaaaacaaaacagactgggcgtggtggctcatgcctgtaatcccagcacactgggaggcct[133 bp omitted]gagacaggagaattgcttgaacctgggaggtggaggttgcagtgagccaagactatgccattgcactccagcctgagcaacaagagcgagactcagtctcagaagaaaaaaaaaaaaaagattagctgggcatggtggcatgtgcctgtaatcccagctactggggaggctgaggtggaagaattacctgatcctgggaggtggaggctgcagtgagccttgatcgtgccactgcattcaggcctgggtaacagagtgagaccctgtctcaaaaaaaaaaaaaaagaaaaaaaaaaatcaaacgagcagctgttatgtacctgggtactgtgtaaatcactttgcatttgttttctaatttagtttgcaagacaaccccctaggaagggttactgcttcccctttagcagtgaggccgtggggcgcaggaaggaaggagcctggccagaactgtccgccagcaaagagggaaagtaggactcgaactcagggccctgaaaaccatagcctcgctcctaatggcccagatctcctcatgtgacatatctcccctttggtgacagggccacttaccaggcaaagcccggcctgccctgcctggggagtgtgtccattcctgaagcagagatctccctgtccctccctctctgtgtagcgagagtcccaggaggtggctgctgtgtctagctgggctgagatccacacagcagcccgactgctgcgggtaccaccagagtgcctggagggggctgtcaccaggagggtcacggtgagcccgagggtcctggggagaggggcctggcctggctgacccacaggctgagtaagcaccatgagggctgcaggcctgacacaccagctgtgcctcctctgccctccaggagacgccctatggccaggtctcgcgatccctgcccgtggaaagtgcctttgatgccaggtggccctagagacgggtgagagtcagagcagggcccgaggcacggctctatgtggctcacccacccgccatgcctacagggacgccctggccaaggcactgtattcccgcctcttccaccggcttctgaggagaaccaatgcacggctggcaccaccaggggagggaggcagcattggcaccgtcactgtcgtggatgcctacggctttgaggtcaccccttggggtggggcccaggaaagggggcacccatataattccgatggatttctgggacccccacagctccagctctccctgggggcactcgcgaggtgcttgtctgtctggcagggcgctttcagggctccttctgcatctgctgggctgagcctgctggggtggggtgcagggatggagaggtaaaggagtggggctgcctctgaggatttagaatctctcaaggactagggctgtctgcgcgccttggagttctcgcttccactcacctccagaggacgatgcccctcaccccacacccacgttcatccaagcatggtctctgctcccttttctggtcctgggctgggcagcctgggccgggagtgctcctggcttctctgggatggctggagcccaccacaagccccagccctggcccgtgctgtcctcctgctgggaggagttgcttagtgcagcagacagagcagaggctctgagtggtcctgccactcactagctgtgtggccttgggcaagtggatgaacctttctgaggtccagcgttcccgtctgtaaaacagaattcccagcaggacctaccttgtgagtttcagaggcttaacggagatagtccatgagagagctgtgtgctccagggcagccgttctgtcccactctggccggtcctgcctttggcatggcctgtcctccgtggccttgtagagacgcaggagtctcaaaggcagtggaagacagaggccccagggtgggcccgcctgtagccccacttcccccacgtcaggaggaaagggaagagggagagtcccccagtctctctcagttggcagaggctctgcacccctttacagaggatcctgccgcctcaggacagccaggagggggctggagggagaggaggtggcccctgccctcagtccctggacgggcactattcatggccccctgttctgtcccacaatccagtgtgtccttgtgaccgtgccctccctgaggctggtggtgatggtggcctgtgtgtgcatccaagctcctgtgtgtgtgtttcaaggggcacaaagctgcatgaagcttcctaagagagtgctgagggagcacttcctataggaggaaggctggaaggcttcctggaggcagcagcctggagccctgtgcatgaggatgcgggactctgatagccaacctgctatttagtagggaaagtcgccttccaagccacaggatggccgtgacaagaggcccaaaggctcgcaggagtgctgcagcagagggcaggggtgtgggcagctagagggacctgtggctgggcagggctgaggtagcccgtgtgctgtgccggatcctttagacttgaccctgttggctacacagcatcagccctgggtattactcatccctgcgccctggccagaatgaaggaagcctctggggtggggggagggcacagccccatgtgcccacctcactgccacatgcccccaggccctgcgggtgaatggcctggagcaactgtgcaacaacctcgccagcgagcgcctacagctcttctccagccagatgctgctggcccaggaggaggtaagaggattgggcgtggacgtggcaggggccgctcaggcattgcccaggcagaggccatccttggtgaaggaaagttgggaactgagagctctgcctggaaggcccctttccatgaggtgtctcagtcttctgagcctcaatgtactattctataagatgggagggttatccctgctcctgcaaaatggccaaatgccggctgttcccaggaggagtgtcggcgggagttgctgtcctgggtgcctgtccctcagcctccgagggagtcctgcctagacctcctggtagatcagccccacagcctcctgagtatcctggacgcccagacatggctgtcccaggtaagggccaggatggtgaccccccacccagtgtcgggaaggagtggaggccctgggtgtccaggctgtagctggcagagcctcccagaggggacaaggttatgggatccagcgaccctgatcacagttcctcagcacagcctgggacagcagcagcgaaggggaagaaccctgggctcccgcagagctgggttcacatcttgtctcggggtgatcttgagcatgacatctggcctctgaggttcctcacgtacctgccacagaagggggacagtagtgcccgatgggcaaggtggcggggactgcacgaggctcatgaagggcttctgcaggtccctcacaattgtggctaggtggccactgaggcctctgactggtcggggacaaaccccagggtaccatgtcccccattccacaaatgctttctgactgcctcctgcctgctcagacttaaatagcagcctcgtccctgtttcccgtttcagcgcgcgtccacatgcagtcacagcgtctattcattcactgactccttaccgcgccagactgggctccacaagggcgggtgcccgtgtgaagggtttgagctctatctgcagcacgtgttaaggaaataatgaatgaatgaataactgtgccaggaactgtgctaaggataaaaggtgaacaaaattagacccagtctctcccctcttacagcccgcagtgcagcaggagagaaatgttcatttaaaaaaacaggccttggccaagctcagtggctcacgcctgtaatcccagaactttgggaggccaaggtgggtggatcccttgagcccaggagctcgagaccaacatgaaaaaaccctgtctctacagaaaatacaacaattagcctggtgtggtggtgtgagcctatagttagagctacttgggaggctgaggtggatggattgcttgagcccaggacgtcaaggatgcagtgagccatgatcatgccactgcactccagcctgggtgacagagtgagaagttgtttcaaactaattaattataaaaaaacaaaccaaaaacgcagagccaaatacaaaatcacccctgtgcggctccgtgggtgggcgtgtggggcagggagagttggggggcgtcatgagcctctaggagctgaggctggaatgtggagcaggagtttctgtggaagctcaatataacgtgatcctgaatatggggcaaccctcccccattttcccaattagtggttgagaatgaaaggtgagccaggcatgggaggctgaggcaggagaatcgcttgaacccaggaggcggaggttgcagtgagccgagatcgtgccactacactccagcctggggacagagca[140 bp omitted]ggtgaaacccggtctctactaaaaatacaaaaaattagccgggcgtgatagtgggcgcctgtagtcccagctactggggaggctgaggcaggagaatggcgtgagcctgggcgacagagcgagactccatctcaaaaaaaaaaaaaaaaaaagaaaatgaaaggtgaaaaacaatggtaaaatcatcaaatgttattgtaatagttcgttgatcactgtcatattaatgcaatacatgtcttcatgtactatatattgatatataacaagtcacattaatatatgatatataatgttcatttattaatacttatacgtatgtaaagtcttgtactagataattaagagagtgttaatttctaaacgattgtttctcccagttcacatttcataatgttttgttaaaacttgtcacgagtgtctttgaggtcccaagatcacttttggaatcccccagcatggatttccagggctcagcaatatcacttaggtctatgttatgtgacatgtaccattttctgagtccgaggtgggtgctgagcctggaattgttaccccaaacccaagttctcatttacataatataggcaagttcccccatgcacttgctattttatgttcattagctcagtaaaataacgtccaactaaattactttttagttttatttttatattttaaaaaatagagatggggtctccctatgttgcccaggctggtctcaacctcctgggctcaagcaatcctcccaccgttgcctctcaaagtgctgggattacaggtgtgagctactgcacctgtccttgagttactgtgtgtgtttgtgtatgtgtgt[131 bp omitted]gcctcgcgggttgacgccattctactgcctcagccttccaag[137 bp omitted]ctcccaaagtgctgggattacaggcacaagccaccgcacctggcctgaaagtgatctttgaaagacttggttaaaagcacatgtaggccgggcgcggtggctcatctctgtaatcccagaactttgggaggctgaggcgggcagatcacgaggtcaggagatcgagaccacagtgtaaaccctgtctctactaaaaatacaaaaaatgagtcgagcgtggtggcgggtgcctgtagtcccagctactcgggaggctgaggcaggagaatggcatgaacccgggaggtggaggttgcagtgagccgagatcgtgccactgcactccagcctgggtgacagagcaagactcgtctcaaaataataataataataataataataatgaaataaataaatacaagcgcatgtgattctgggactattctcccaggaatggttgctaaatctgtactaaagctcctcatc[131 bp omitted]cctgcctcagcctcccgagtagctgggaccgcaggtgcccgccacc[187 bp omitted]tgtgggaccattctcccaggaatgattgctaaatctgtactaaagtgccccatccccatttctttttttttttttgtttaagtacttacttattttagaaatggggtctcactctctcacgcaggctggagtgcagtgacaccatcatagcttactgcagcctcaagctcccagtctcaatcagtccttccacccagctaatgttacttttttcttttctttttttttttttttgagacggagtttggttcttgttgcccaggctggagtgcaatggtgcggtctcggctcactgcaacctccacctcccaggttcaaatgattctcctgcttcagcttcctgagtagctgggattacaggcatgagtcaccatgcccagctaatttttttgtatttttagtagagacagggtttcactatgttggccaggctggtcttgaactcctgacctcaggtgatccacctgccttggcctcaaagcgctgcggttacaggcatgagccactgcgcctagccccacccagctaatttttaatttttttttttttttttgagatggagtctcgcactgtcacccaggctgtagtgcaatggtgccatcgtggctcactgcaacctccgcctcctgggttcaagtgattctcctgcctcagcctcctgagtagctgagattacaggcacctgccaccacgcccagctaattttttgtatttttagtagagttgggatttcactatgttggccaggctggtctcgaactcctgaccttgtgatctgcctgtctcggcctcccaaagtgctgagattacatgcgtgagccaccgcgcccagcccaatttttaaattttttgtagagatgggatctcactaggttgcccaggctgatctcgaactcctatcctcaaacgatccgaccacctcggcctcccaaagcgcttgttttggggaacaaagccaaacctacccttatagtcagtgtaggcagtactcgtgctcaccgggagagggcgccatccagaaggacagcctgtgcagaggcgtgaagggagctcatggctcctctcctaggccacggaccacaccttcctccagaagagccactatcaccatggtgaccaccccagctatgccaagccccggctgcccctgcccgtgttcaccgtgcgacattatgcagggactgtcacctaccaggtacctggcctcagggacagaccagggtgaatcagcgagggcagtgtcccctcccaagctgagtcacccgacagcggagaggagtgggtgtggggaggccccttgcaaggcttggacacctgtccctacctgagccatgggccctgcccagttctgagcacggtttactgagttctaggtgacaattatggggtcagggagtggaagccttgggaccctccagacaagtgggcagagcacaagcatgggacctgatgaccttggcagtttacttcgccttctgagcctccgtttcctcacctgtaaaatgggtatggagacctaagctctggcgttgctgtgagggtgagatgtagtaacgtggagatggcctggcaggtgcctggcacatagtaggtgctcactgaatggacttcccttcccccttccgagttctatgcctaccaagaagctgcacgcgtgcctaccccaggaggagaggaactgggggtgggggagcgggggctggaataaagggaagggcagtagggagaatcagttctccctggaggagatggcacactttgcttggagaagaaaaactacaaactacccaggagttgcccccaaaaaagaaatacaaggagttcaagaaagctaggaaaatgtaaatcaaaatagatttaatatggagagacagacaacattcttgtctagtcaacctattgactagcataggttaaagccccagtggggagagtgtggtcttgctggggactggacctgtccatggggtggaatggaaagtccagtggcagacccaaggctaggtaaagggctggaaacaccaaggcagcctttcaggtcacctggggagagggtagattcttctcctccatatccagcctcccctccttggttcctgttctcctccctttctccacttccctccccacctgcatggtctcttgcaggttcacaagtttttaaacagaaaccgggatcagctggaccctgctgtggtggagatgcttggccagagccagctccaggtgcccatctgcccttccaggcccccacccgctccatactctgtcccccaattctgtccttttccccctgggcgctcttgcccaagggttggccctcaagtccctggcaccttgggccatgggctgagcttgccagggtctggatgccgagggctggtccattctggctctcccgggctgcagggtggatgggcacgccccagcggccagctgactcagcccttcacccccacagctggtgggcagcctgttccaggaggcagagccccagtccaggggagggcgaggcagacccacgctggcctctcgcttccagcaggccctggaggacctcatagcccggctgggcaggtaagaacagcgcccgccacaccagaccccagggagttgtatggggctccagtctgtgcccgagtgacccctctttccctcatcaggagccatgtctatttcatccagtgcctcacccctaaccctggaaaggtgagctccccagcaactggcctcagggccctccccctccctgcacctccctccccacagctctaggccccttgactccagctgtctttggctctgtcttgtggccacagcttccaggcctctttgacgtgggacatgtgacagagcaactgcaccaggcagccatactggaggccgtgggcacccgcagtgccaacttccccgtgcgtgtgccctttgaggccttcctggccaggtggggcccagcacctcggggcaggactgacaaggaggccaccgggagtgactggcagccccgggggtccttctgattggagatggactcactctgcccaggactgggcctagcacccaaccctccctctctctcctcgtcctctcatcctctctctctctctctttctctctccatctcactctcttctaccattcaccatccctccacgcattcgtcatttcttctcctctctgcaaacctctcctgtgctgatgcctgggcaccagagatgaggtgggagcagtacctgccctaggcggggctcacggtctagtgcccacagcagctgtccagggagtgcaggctgaagcagtgagatggcaggggggacggagtgagaaaagagcctctcagaagggcaggaggggcggggaggggcggggtggcacatggagctgccaggaaccccagaggcagctctgttcccagagttcagaaacctccaagaaaagctggtggcattgtccgttttgttgtttgcctatctggcctttggctattgactggatggcatcttgggaatcctctgaagggctggagtttaccccaagcacagggacagagggagcaggtggagtcacttctcgttgatgtccagctgagctgggctggtggctgcctcagaagggagggggcagctactaggagcagcagcctcaccccagggctctgtggacctccttagcctgtgatggccttggcaatggggatggcctggttgggggactgagcaaaaggcaggcagtagggatgggtgttcccagccttgagtcagatcctgagaagctccagggcggggcacgttctgtctctgccatctggaaacctaccagctacagcaattgtcacctccaacaagaacccctgagcccggaagctgggtgagaggaacctccaggtacaactctccacccagcacagaccaggtctgctgatctgtgccattccctgatgcactgtggcatcccgtgaccacagactgtcacccacatccccagaacctgcacggtgcttgcttggtacagactaactactgagtgtccattaagccaaactggtaccaccatctggacctgtgaaatgtccttcaacactcccccacccaccccttcctgccacgcccctccctcccttccacgtccctccctcccacgcccctccctcccttccatgcccctcccttccacacccctccctccctccctcccacaaacttgtcttgagacctactgtgttgggtggcgaggagacgaaggccttgggaaccacattcctgttgctcccgtggcccagaaccagccctcatgcctcctgcgcacaccatgttcacctgttctccccctgagctccagcgcagagaccctccctgcccaagttcactgcagtgtctcagcccccagctgagcgcctggcatagagcaggcactttccaaattttttaatgatctagaaatgaaataaat[137 bp omitted]tagagaaaccccgtctctactaaaaatacaaaatcagctgggcgtggtgttgcatgccagtaatcccagctactcgggaggctgaggcaagaggatcacttgaacctgggaggtggagattgtggtgagctgagattgcaccattgcactccagcctggaca[184 bp omitted]gtggcgggcacctgtagtcccagctactagggaggctgaggcaggggaatggcctgaacccgggaggcggagcttgcagtgagccgagatcgcgccactgtactcccgcctgggcaaaagagcgagactccgtcttaaaaaaaaaaaaaaaagtgtaaaaggaggttctggctattctgatctcagctccatccttggagcagcttccaggccctggggtcagaagggcaggaagacctctctgaccgggagaagtgtggtgccgtcctgagccaggtgctgggggccgaatcacctctctatcaccttggagccaccaaggtgggtgtgtgtatccctgtgtgcagagggcagcatgaatgggaaaggagaggtgcattctgggcccaaagggacaaacccaggatttggggatccatccaagtggtgggagacagaagggctggacggcagggccagaagaacaaatggtttggctggaagggaggaggctgagaccagaggaggagagcaggaggggctggctcctggctcctgcctacagcccacccctctacccacaggtcctgctgcaggagcagggctggcagcggctggaggagctccgggaccagcagcgctcccaggccctggtcgacctgcaccgcagcttccacacctgcatctcccgccagcgcgtcctgccccggatgcaggctcgcatgcgtgggttccaggccaggtctgcaggcgttggagccagggctgaagtgggtggggtgaggccgtgggttcgtcctccaggtggtggggcagggttggggaaacatagggcctcaaggcaagtcatcctgccccagtgccatctcatcggcatgtgactctccttgacggcattaccccccatacccgtgcagcctctgcttgaataccccggccacaagaaactcattacctactgaggccacctgaacctgtggtcctgactcctttatcattctcttttctggtctgttttccacactgtgggaacaatctttgtttttttttttgagttggagttttgctcttgttacccaggctggagtgcagtggcgcgatctcagctcactgcaacctctgccccctgggttcaagtgattcgcctgcctcagcctcccgagtagctgggattacaggcttgtgccaccacactcagctaatttttttttgagatggagtttcactcttgttgcccaggctggagtgtaatggtgcgatctcgggtcactgcaacctccacctaacaggttcaagtgattctcctgcctcagcctcctgagtagctgggattacaggcatatgccaccacgcctggctaattttgtatttttagtagagacggggtttctccatgttggtcaggctggtctcgaactcccgacctcaggtgatccgcccgcctcagcctcccaaaatgctgggattacaggtgtgagccaccgtgcccagctacagtcatcttttcaaagcatgaatcatgttgttaaggacctgactacctccccagcccaatttaggccagacttttaccctgcagtgactttagacttctctttcctataacaccaccctcccacttctcacctaatcatctctttttcgccctcacagcctgtcttcacacattcctccaacagctgttggctgaccgtctgcctcatctacccttgggccagatgctggtgacagagctggggatgccagagacggggcctcccaggctggttgggaagtcagattcagatggtagagcagccagtgatcttcccagagagtaactcgagggctgagaatgaagtgaagacagtgcagaacatcgggggagccaggcatctccactatctatttccaacacgttttcatcccgcaaacagaaactctggacccattaagcagtaactattgcccccaagacccccagcccctggtaactttcagtctacttgagtctctatgaagttgcccattctagatacttcctgtaagttgactcatacaatatttccttttacgactggcttctttcacttaacataatgtttcaaagttcatccatgttgtagcatgtgtcagaaattcattcagttccaggcttgagggttaataattaattattattattattattattattattattattatttgagatggagtcttgctctgttgcccaggctggaatgcagtggctcgatctcggctcactgcaacctctgcctgccaggttcaagcaattctcctgcctcagtctcctgagtaactgggattacaggcacccaccacccgccaccacgcccggctaatttttcatattttcagtagagacggggtttcaccatgttggccaggctggtcttgaactcctgtcttctgagtcgatccacccgcctcagcctctcaaagtgctgggattacaggcgtgagccactgcacccggcctgttctagtctgtttacaaatctttggggtataggccaaggagtgaaagtgctggtaattctatcatatggtaattctatgtttaactttctgaggagctgccaaattgctttccatagtggctgcatcattttatgtttctaccagcaatgtacaagggttccagtttctctacatccttgccagtacttattcttttccatttttaaaatcatagccctgctagtgggtgtgaagtggcatctcattatggctttgatgtgcatttctctaggactaatgacgttgagcatctcagacattagtgccactcctttggagaaatgtctgtttctcctctgcccgtttttagtttttaattaattaattaatttttgagacagaatctcgctctgtcacccaggctggagtgcagtggcgccatctcagctcactgcaacctctgccccctggattcaagccattctcctgcctcagcctcccgagtagctgggattacaggcacctgccaccatgcccagttaatttttgtgtttttagtggagatggggttttactatgttggccaggctggtctcgaactcctgacctcaggtgatccacctcaggtgatcagcctcccaaagtactgggattacaggcatgagccactgcacccggcctttattttttataattattattttttattaaaaaaatttttttgagacagagtcttgctatatcatccaagttggagtgcagctgggtcacacctgtaatcccagctcctcaggaggctgaggcacgagaatcacttgaacctgggaggcggagattcaagtgagccgagatcgcgccattgcactccagcagcagcatgatctcagctcactgcaacctccagctactggtttcaagtgatttcgtgcctcagcctctggagtagctgggattacgggcataggccaccaagcccggctaattttgttgttgttgttgtttttcttttgagatggagtctcgctctgttgcccaggctggagtgcaatggcttggtctcagctcaatacaacctccgcctcctgggttcaagcgattctcctgcctcagcctatgaagtagctgggactacaggcacctgccaccatgctcagctaatttttgtatttttagtagagacagagtttcactatgttggccaggctggtcttgaactcctgacctcgtgatctgcccgcctcggtctcccaaagtgctgggattataggcgtgagccaccacgcctggccttttttgtatttttagtagagacggggattcaccgtgttggccaggctggtctcaagctcctggtctctagtgatcctcccacttgagcctcccaaggtacagggattacaggtgtcatacgggtatgagccattgcacccgaccagtggtgttactttttaataagttctgctgctcttttttttttttttgcaagatagggtctgactttgtcacccaggctaaagagcagtgacccagtcatagctcctacctcagcctcccaagtagctaggactacaaggacacgccgtcatgcctggctaatttaaaaaatcttttttgtagagatgaggtcttgctatgttgcccaggctggtcttgaactcctggtctcaagcaattctccttcctcagcctcttagagtgctgggattacaggcatgagctaccgtaccaagctaagggaaatgatttttttttttttttttttttttttggtcagtgtgcatatggggaactgatctgaacccaggtattctaggcccagggtcagagagtcagatcttaatccctcaggctaaacagtctctcaatttactcgttctccttcctcccttcctccctctctccctcctccctcctcctctctctctttctttccttccttcccttccttccttcctccctccctccctccctccctcccttcctgatggagtcttggtctgtcacccaggctggagtgcaatggcgcgatctcggctcacttgaatctccacctcccaggttcaagtgattctggtgcctcagcctcctgaggagctgggattacaggtgtgctgtaatttttgtatttttagtagacggggtttcaccatgttggccaggctggtcttgaactcctgacctcaagtgatccacccgccttggcctcccaaagtgctgggattacaggcatcagccaccgcacccgacccttgcttttcttttgaagtatcctattcttttcctgtcgtttctgtgaagcatccagggcttctctggtccaaagtcagtttttacatgaatgtcaggcttaagggattccagtgccaggcaggaagcataagtttggactcttcatttcgcccccgctctttcccggcctccaggaagcggtacctccggcggcgggcagctttgggacagctgaacaccatcctgctggtggcccagcccctgctccagaggcggcagagactgcaggtgcaggggcttgggtggggcggttcagggtagaagccaggctgcctgagctggccgagctggccaaatcccagcagcgttgaccctctcagcccggcctcgcacgggctgtggcttcagacacagtgctccttgaactcatcccttttccctccggccggggtaggccggggcccttgggaggtgctgtcttcctccatccctgcctactctccccagggcctggctcttccctcttgcctggggttcccatcccctccaggcctcccctgggccccgtccgctcccctcttttgcatgatgactcaaatctaaggtctataaagcgactcaaaggtcaatgcccacgtgctaccccctctctggcccctccctggctggactttgtcccctgggaccatttcttcccttcttcctgccctcttcccggtgccctggcagatgggcacagacgcccacagtgctaaggctggtgagggccctggagggccaggggtggctggcccctcctgatctgttctcactcctttgctgagaacctcccaggggcaggaggggacagctgaacttcagagctggggaggtgcccccaggtgactcacatgggaggcatcagctcttcccacatctcttccaacagcttgggcgttggcagggctggcatagcagcgaaagggccttggagagagtgccaagcatggtaggtggcctggaaagtggggggttttacatggggctatgaacctgctgagactgggacagcttagagggctgccagggtgctaccgtgggtcttgtccctcagggccatgcattgcacctcctgagaagaggaccggggtgctcttggctcttggtttccctcagagggtctttggggctctgtttgttcgagtgtccagggtcagaatccttggtctttggctgggtgtggtggcacacacctgtaatcccagcactttgaggtcgaggtgtgaggattgcttgagcccaggaatttgagaccagcctgggcaacatgacaagaccccatctctacaaaaacaataaaaattagctggacacagtagcacatgcctatagtctcagctactcaggaggtttgaggtgggaggatcgcttgagctagagcctcagaagtcaaggctgcagtgagccatgatggtaccactgcactctagcctgggtgacagagtgagaccctgcctcaaaaaaaaaaaaaaaaaaaaatccgtggtctttggaagggatgtttataatcttggggttgagggtgtggggagggacactggtccctaggcccctcctgtggatcctgggtaaatgagtcccctctgccaggagctggggcgcttggagatcccggctgagctggccgtcatgctgaagacggcggaaagtgagtcttgttggtgtcctcttgttaggactccttctccagtccctttactgtggggtgtgtctgtcccttgtggttcctccctctgatgctccagactcccctgagctcatcacttgggtccctgtggacaggggctgatggctcgtggtgagggatggaggtggtcccagggccaggtaccacacctggatgctcctgggctgcctcccggtgcttgttcccaggccatcgggacgccctggctgggagcatcaccgagtgcctgccgcctgaggttcctgcccggcccagcctgactctcccagcagacattgacctgttccctttctccagcttcgtcgccatcggctttcaggtgggcgcccaggcctaagctcttcccgctggcctcaccgctctgagttagcacctgcctgacagatgctgcgtttttttccccgctgtcagctcttgccctccttcctccccagcctttggggctgtgagtagcgctgaattgctctgaaaataaccgttgaatgtaattgtctcaccatagagcgttactggagataacagttggtgttattgaatgggagacgttatttagatccacgatgccacacctttgttgtacctgcggtagtgccctgcttttgaagtcatgaccttaaagaatgtttattgacaagggaaattgtccagacttcagcagtaaatacaaatgcaggttcaaaactgcacatacaggttggacatggtggctcatgcttgtaatcccagcacttttgggaggccg[134 bp omitted]agaatcacttgaacctgggaggtggaggctgcagtgagctgagattgtgccactgcactccagcctgggcgacagacaagactctgcctcaaaaaaaaaaaaaaggcattaagatgcatttctgtccagcccctctgcctctcccgaggtgcctgctccggtggggctcccctgggctgtctgatagctggtgagcatggactgagccctctccttccttgcaggaaccgtccctgcccaggccagggcagccactggcgaagcccctaacccagctggatggagacaaccctcagcgtgccctggacatcaacaaagtggtgagtgacacattggagaagggacaggataggcgcctgggagccccgcacgtcctgtccttacccggctgtgtcggcagatgctgcggctcctgggggacggatccctggagtcctggcagaggcagatcatgggcgcatacctggtgcggcaggggcagtgccggccagggctgcggaatgagctctttagccagctggtggcccagctatggcagaacccagatgaacagcagagccagcgtggctgggccctcatggctgttttgctcagcgcctttcccccactgcctgtcctacagaagccactgctcaagtaaggggcctgggaggtggggacctggcaggtggggtcgctggatcaccctgcctccactgcagcctgtgcccgccctgcaggttcgtgtctgaccaggcccccaggggcatggcagcgctgtgccagcacaagctgctgggggccttggagcagtcgcagctggcctcgggggccactcgggcccaccccccgacccagctggagtggctggccggatggcggcggggccgcatggcgctggatgtgttcaccttcagcggtgagggctgcctctggctgaggcctcccaggcctgaagtggggccagccctacccctttgccctccctggaaccccttcctgccccagtcttcctgctgccctgtcctcagtgaccctgatccccctcccctctgtcctgcttttgaaactctcatggggacagcagccccttcctgtcagggtggactctgctgtccctcactcttgcccccgccccccatgcccctgcagaggagtgctactcggccgaggtggagtcttggaccaccggggagcagctggctgggtggatcctgcagagcaggtatggggaccggggatgggggacagtgtggccaaagtgacccttgtcctataccctcctccttctccaagcccagtctcaggggccgggaggagaggtgccccggggtgggcaggggccagactgcagatggcgatggggagccgggggcagattaggaatgaggggcttgggagctcccacggcagattctaactcagcaggtcagaaaagaaatgcccatgctggagcccttgtggaagtggagggccgtgaggtgaggaggggagcagcccccactgctgagcaaacctgggtcccggaccaggcggatccagggccaccctcccttcctcagccccctgcccccttggcccaccctgtggtccttgcccccttctggatggccgcctgcctcactgactggtcccctcccacccagaggcctggaggcgcctccccggggctggtctgtgtcactgcactccagggacgcatggcaggacttggctggctgcgactttgtgctggacctgatcagccagactgaggacctgggggacccagctcgcccccgcagctaccccatcactcctcttggctcgtaggtgccacccagcacccctctccctggcctgctcctgccggggaaccccacagccaccctgccacactcaggggtttataggagctgccacaggcccagccctcccacccagcctcctcccaaccatggggtgacccccgcagcagcttctacctcttgccccagcctgggtgaccctcagccttggccacccccttagctggatcccgtttcctgcagagccgaggccattccccttgcccctggcattcaggccccctcactgcccccaggaccccctccaggtccagccccaacgctgcccagcagggaccacacaggtaaggctggagtgggcacatggaggttggcagagcatgggaagccccacgccccgggccatggctccaaccctctccctgccccacaggggaggtccagaggtcagggagcctggacggcttcctggaccagatcttccagccagtgatatcctccggcctcagcgtgagtcgggcacagcccccaaatgcccctgccccaaccccccggggcctctgctgccccttccatttttctcagggctctcactctgacctgtgaccattgtccctttaggatctggaacaaagctgggctctgagcagccgcatgaagggagggggcgccattgggcccacacagcagggctaccccatgggtgagtgaggggctgattcctcacccagggcctccgggcccggcagcatggcaggcatggcctgggacccctctggcagtggcgatcgatgccctggccagcaccccggtgcccgatgctcttctctgtgcctggggctggagggaggtggcatgtgggcccaggcagggactgacagggagggcgtgttccctcagtgtacccaggaatgattcagatgcctgcataccagccaggcatggtccctgcacccatgcccatgatgccagcaatgggcacagtccctgccatgccaggtaagtctgggctgggggcaccagagtcccttctcaggagagcagccaccagctctgggactggaggagggagggtcctgctaggagtcccgagtgcacagtgggcagcgagcttcaaggctggccatggtgcccaccactctggccgcctgccgccctcacagccatggtggtgccgccgcagccaccgcttcccagcctggatgcagggcagctggccgtccagcagcagaactttatccagcagcaggcgctaatcctggtgagcgctggcagggccctggggccacctggtggaggagaggtctgtggctcggggatgagggtctgaactggctgctcctcctgcttcaggcccagcagatgacagcccaggccatgtccctgtccctggagcagcagatgcagcagcggcagcagcaggctcgggcctccgaggctgcgtcccaggcctcaccctcagccgtcacctccaagcccaggaagccccccacacccccggagaagccacagcgtgacctgggatcagagggtggctgcctgagggtgaggaggtgaccatattctcaggaagggatgtgagggtggggactgcaggggcaggggacatgggcagggtgagtaggcagacacagggaagaggctgctggcccaggactggggacccgaggggtgtggcgagtgtggcacccaggctggctgagctgccactcatttctgcttctgccaggagacctccgaggaggctgaagacaggccctatcagcccaagagcttccagcagaaacggaactatttccagaggatgggtgagggcacttggggtggcaggaccgtgcagaaacatggccagtgcccctggcccgggccagggagggtggggtgtgctctgctccccggagttggtgcggcccatccaggagcccagctgggccagtatgggtaactttgaaggccatctggacacttgcagggcagccacagatcacagtgaggacgatgaagcccccggccaaggtccacatcccccagggggaagcgcaggaggaggaggaggaggaggaggaggaggaggagcaggaggagcaagaagtggaaacaagagcaggttgtggggagctgggcagggcctggggctccggtggctctgcacgcggttaacagtctttcctgtttcctggtcagtgccgtcccctcctcctccccccatcgtgaagaagccattgaagcaaggtggggccaaagctccaaaagaggctgaggctgagccagccaaggagacagcggccaagggccatggccaagggccagcccaaggcagggggactgtggtgcgcagctcagactccaagcccaagcggccacaacccagcagggaaattggcaacatcatccgcatgtaccagagccgcccgggccccgtgcctgtgcccgtgcagccatccaggtgggcccccacggggaggtggccagggctgtcccgctcctcggggaatcaccctatgaacttagtgacctcttgcttctcccacgaggcctcccaaagctttcctgaggaaaatcgaccccaaggacgaggctctggccaagctgggtatcaacggtgcccactcgtccccgccggtgagcaccccagcctgtctcccccagagtgtgtgctgctgcactggggagctcaaggctctctggggcgaacttggccttgtgctgtgactcagcccgtgtactttctccgtatccccccagatgctgtcccccagcccaggaaagggccccccgccagctgtggctcctcgacccaaggccccgctacagcttgggccctctagctccatcaaggaaaagcaggggccccttctggacctgtttggccagaagctgcctattgcccacacacccccacctccaccagcgccaccactgcctctgcccgaggacccagggaccctttcagcagagcgtcgttgtaaggaaccacatttctcctgcgccgtgggcttcactggggcagaggcagggttcgcacagactctcggtgcccagggctgaaggcatttctgcgtggctgaggccagctgttcgggcttctggactttggagccatacgtagctggggagtcccagcttccgcgttcccacccagggcagggcctgggcatctttggggctgtcatcgagaggctgtcacacacagggtgttgtccctgacacatacccgacagctctgtgaggaagttagtggccctggctgacatggtcatagaagacccacgagcctcacggacgccagggaaagtttagggcccaaaatggaggcaggagatggtgccatggaaggagtaaggcagctggaggttgggagagccgggcccttggaaggctcgtggggatgaaggtcttccctcccgtgcccccatcactctggctctgcagcccctcactgaggctcctcaccccctcctctctgccaggcttgacacagcccgtggaggaccagggggtctccacccagctactcgcgccctctggcagcgtgtgcttctcctacaccggcacgccctggaagttgttcctacgcaaggaggtgggcatgagggtggggccttggcctggcctctttgggctggcagggaggcggcaggctttgtgcatcccagcctgggaccccagcatcccctccccacagcccaccatctcaaggctgattttccaggcctgggagggcagaggcttgctgggaagaggcaccagacccaccgatctttgcccttctgtgccctcctccaggtgttctacccacgggagaacttcagccatccctactacctgaggctcctctgtgagcaggtgagagctggcccacctgccagcctgagacatctgcagagacagcatccttcgtgccctttgtctaatggctgggccaggttaacaccacgtagggcatgttggcagccagcactggggggcacttctgtgtgcccagacctgccttcattgaaccttcacaacattcctgagaagtagggaccatggccaggtgcggtggctcatgcctgtaatcccagcactttgggaggccaaggcaggtggatcatgaggtcaggagttcgagaccagtctggccaacatggtgaaactccatgtctattaaaaatacaaaaatcaggcgtggtggcacgcacctgtaaccccagctacttgggaggctgaggcaggagaattgcttgaacccgggaggcagaggttgtagtgagccgagattgtgccactgcactcccgcctgggtgacagagcgagactgtgtctcaacaacaacaagaagtagggaccattattcatctagttttatagataaagtttaaaagcaaagtgcgtacagtgcacaacacaggctctagcacacagtaggtacttaataaatggttgtcactttgccacctctgaacgctcccaggagtgagcctctgttccccctaattctgcagtagcacctgccccctgccccgaacaatcttgtatctgggctgatccaagggcagttaccacggggtctctgggcagtgagtgaaaagggagggctggcagttgcaggggaggggacaggtgagacgtgtgaatggaggtggcccaagccctccatccctccctgccccacctaggccctctgctgagcacacaggccatgggggccagggcgccctccatcggcctcctcaggttttccttcatgcatgtggatggctgctctgggggtgggctctgtctcaggacctggtggtgaccacctcgctctgcccccagatcctacgggacaccttctccgagtcctgtatccggatttcccagaatgagcggcggaaaatgaaagacctgctgggtatgggtccagggaccatggagttgggagcttgagtgctgggggccgcgcctgccctgaaggagggagcagcatgggagcaaactctagagccccctctgtgtgagcagagggcagcctgggtccttcctgcccacaggaggcttggaggtggacctggattctctcaccaccaccgaagacagcgtcaagaagcgcatcgtggtggccgctcgggacaactgggccaattacttctcccgcttctttcctgtctcggtcagtggcgctggggtagggagtagggatgccaggcccccagcctggatcctggggtgcatgggcacagaccacaagcaggagagccggggagcagacgccaggggaaggacaaagcccagccactggccctgggcagctccagggcatcttgggcagtagcaggacccaggagactgcccgagacccaccaccttcctgtagggcgagagtggcagcgacgtgcagctgttagccgtgtcccaccgtgggctgcgactgctcaaggtgacccaaggccccggcctccgccccgaccagctgaagattctctgctcatacaggtgcgctagcccacgaccctgggctagaggtgggggcaggtggcaaggtgacctcagttcatgcccgatccctgcgcagctttgcggaggtgctgggtgtggagtgccggggcggctccaccctggagctgtcactgaagagcgagcagctggtgctgcacacagcccgggcaagggccatcgaggcgctggttgagctattcctgaatgagcttaagaaggtaagtgtggggcacgggttgagaggccgggcagacagccctcaccgatgctgcatctccctgtccgtcttccctgtgggggcaggggctgggagtttgggccaaatccctggaagtctggggtgctaggtggaggggcaggccagcagggggagcaggtgggcaggcaggacagggaggcacaggcagacttgctgctccaggccctcgcctgcttgcccacaggactccggctatgtcatcgccctgcgcagctacatcactgacaactgcagcctcctcagcttccaccgtggggacctcatcaagctgctgccggtggccaccctggagccaggtatcgccagaggccggcaggggctcacacagggagggcatccacttggcagaggctgcccgggggcagagggtccagtgggtgagccacatccctgggtgccttccaggctggcagtttggctctgccgggggccgttccggactctttcctgccgacatagtgcagccggctgccgctcccgacttttccttctccaaggagcagaggagtggctggcacaagggtcagctgtccaacggggaaccagggctggctcggtgggacagggcctcagaggtgaggaagatgggagagggacaagcagaggcaaggcctgcctgagactgaggaaggaaaggggtttgaccactcccgaggctgccatgcggtgggaccaccctgctgtccgtctcctgtggctgcccctctgcccgctcctgatggctcgccttgtctctccagcaagactgtgcactccttgcaggcaggggctgggctggatgctgctcttgtgtcccacgtggtacttagttcaaggctgccccagcagatgcttaataaacagctcttcactttcctggcttctggtcttgctcctttggtgtctggctggggagggatggggctggggcaggacccctgggacagggcactggacactcaggtggcaccaggtttcttgtgatcccagcgccctgcccacccttggagccaggcacacagtgacgactcggaggccaccagcctgtcctctgtggcctatgcctttctgcccgactcccacagctacaccatgcaggaattcgcccggcgttacttccggaggtcccaggccttgtgagtgcactgggccaacccctgtgcctgtctgtcctcagtcttcctgagagagagcaccctgctcagagccactgggctgtgctcttagcactctccctgcctggctggctgggatgaaggcaggagggccaaacaagctgggctgtctccctctgccccccacaggctgggccagactgatggaggtgccgcaggaaaggacacggacagcctggtgcagtacaccaaggtgggagagaggcagggaggggtctggcccgtagatctgccctctgacccccacggccccccagacccatggcctcctctctttggccacaggctcccatccaggagtcgctcctcagcctcagtgatgatgtgagcaagctggctgtagccagcttcctgggtgagtggccacaggcatcctgggtccccatgtctgcagtgccatgaacctgggtgtctggtccccttatctccttgagctctgcctggctctgtcccagtctgccaactccgggaagctcactggtggttcctggaccccagggccctcacccgcttctactcccactcaagggttgtgggttgtgtggagtctggggttggaaggcagtccatgggtccagaggatgctatgtgctgtgtggggccttggatacccaggagcctcagtttccccatgagtcgagctgcaaccagctgccctggctggcatctatgcattttgagagtgaggcatcagatggcaggtgaaggccctgcacagcaacagcatgagccggggccagccccagcacagccccagctatgtgccctgtttcttatcgtgcctgcagccctgatgcggtttatgggtgaccagtccaagccccggggcaaggatgagatggatctgctctatgaactgctgaaggtaagcctgggctgtgcgacccccagcgcctgtgcctgtcctcctgtctgggcctgaaggagatccccttctcttggtcactgtccttcaaatcattccaaagtatttactgagcacccattgcgtgcaggggggtgtggctgtgaagccaacaggctaagtctctgcagtgcttacaatgagataacttatgtgtctgggagtgagaggtcactggagagtaagaatgcagggaaggggctgctgcagtggagaaggctttgtggcagaagccttcctacagggagggaaggagtgagcacggggtgacagagaagggcaggcaacagttcagatgtggggggaagcctcggcaccatcacgcaccgggaccagcgtggctgagcctagtgagctgcagggagaacggaggatgaggatggggagcggatggtgggtccaggccaccacaggccttgtagccatcattggcctctgatttttggagagatgggaaaccaccagaggattctggagagagactcggcttacatttcacagggtcactcggctgttgtttgagattctgggtgtctaagtttaaaagcaaaaggaagttattgcagtggtcccaggtgagggatggtgctggcagcaagggagaagcagaagattgagccagcagagtgtgctgaccaattgcatgtgggctacgggaaggaggacaactactgtcttcaaggagcaggtcttggctggtggaggaaatctgttttggacacgtgaggtctgaaatcccagacttcccagtggaggagtctggggttcaagggagaaggctggaggcaggcaccaggagtcatcaaatgggaccagctgaggacacggggagaagggcagacagagagaggttcaagggcacagcaccgctcagaggtcagggagttaaggtggagccagcagagatgagtaagagatcagagaagcaggggccgggcgcggcggctcccgcctgtaaccccagcactttgggaggccgaggcaggtggatcacctgaggtaggagttgcagaccagcccggccaacatggtgaaaccccgtctctactaaaaacacaaaaattagctgggcgtggtggagcacacctgtagtactcggaaggttgaggcaggagaatcgctagaacccaggagggtggaggttgcagtgagccaagatggcaccactgcactccagcctgggtgacagggcaagactgtctcaaaaaaataaaaaataaatgaaaaggccgggcacggaggcccacatctgtaatcccagcactttgggaggccaaggcgggtggatcacctgaggtcaggagttcgagattaaacctggccaacgtagtgaaaccccatctctgctaaaaatacaaaagttagctgggcgtggtggcacgcgcctattaatacttgggaggctgaggcaggagaattgcttgaacctgggaagcagattgcagtgagctgagatcatgccattgcattccagcctgtgtgacagagggagacgggagcagcgaagaaagtaactgagtagccagtgcagtgatgtcttaagctgagagagacatcttgagccagccccagcccatggcctagcagggtttctccagggcttcagaccccaggctcaccgctgccatccctcaccccacctgcccttcctgtccccacagctgtgccagcaggagaagctgagggatgagatttactgccaggttatcaagcaggtcacgggacacccccggccgtgagtggggaccggtggcttctgggggtggcttctgggggcagctgggcactgtggcctggccagcctgaagcccgagcgctctgccctgcagggaacactgcactcgaggctggagcttcctcagccttctcacaggcttcttccccccgtcgaccaggctgatgccctacctgaccaagtttctgcaggattcaggccccagccaaggtgcccgtgggaaggggagatggaggagaggcaggggtttctaggactgggaacttggtgggcttggggagacatggccatctcataaccccaggctggcttctctgcagagctggcccggagcagccaggagcacctccagcgcacagtcaaatatggggggcgccggcggatgcccccaccgggtgaaatgaaggctttcctggtactgggggtggcggatgggcattgtgggacaccctggggtggggagtgtctcctacaggagaccactggccgactgaccctgcaacctgccttggcagaaaggacaagcgattcgcctgcttcttattcacctgccggggggtgtggattataggacgaatatccagactttcacagtgagcttgggggccaccaagggaggaggccttgggcatcagttctgggtcccccagcctccctccccctcatcacagtctgtccacatgcccaggtagcagcagaagtgcaggaggagctgtgccggcaaatgggtatcacggagcctcaggaagtgcaggaattcgccctcttcctcatcaaagagaagagtaagcttggggacggagcctcacggtggggccactcccctgcccaggggtgaggtggtttggtttctgctggggtggcagggccgggtgtgtgtggtctgagcagcagtggacctaggctccccatgcaggccagctggtgcggcccctgcagcccgccgaatacctcaacagcgtggtagtggaccaggacgtgagcctgcacagccggcggctccactgggagaccccactgcacttcgataactccacctacatcagcacccactacagccaggtcagcctgcctgcctccgagctgctgctgcagtttgagggcgcggcttcctgcctgggcgacctccaagcccctctccccacaagggtgtgggtctgtggtggctggggggtgacagtggcaaaaggaggcttgagcctctagagccaccaactgatggggggctttggaccaccgctgccctcctcaccgtgctccccgcacaggtgctgtgggactaccttcaggggaagctgccagtcagcgccaaggcagacgcgcagctcgccaggctggccgccctgcagcacctcagcaaggccaacaggaataccccctcagggtgagtggaggcacctcccgcccctaagcccctccccttctctaaggtcaaggccatttgactggtacccttcctggccctaaatggactggccaggagcagcggggcctgtgaacatctgtcctctccaccccaccccgagctcctctggtgcaggaccctcacctcattcatgtgtatggatgtctagtcttgcccacaataggcactggttatttggcacgtgctgtatgcccagccctgtaccaggtggtcaggggccaaactgaccctggtcacacatcctaggcaggacctgctagcttacgtgccaaagcagctgcaacggcaggtgaacacggcctccatcaagaacctgatgggtcaggagctgagacggctggaaggacacagcccccaggaagcacagatcagcttcattggtgggtctgggactaggggaccgctgggtgggggctggaggccaagagggaaggaatgcaggtagaggggcgaggaggggtctgcgcctgccctgtccctctcagctgacctgggggaccaagcagagcaggttccagggccccagcagtcagatttcctgcctgcaccctctccacccgcagaggccatgagccagctgcccctcttcggctacaccgtctatggggtgctgcgagtgagcatgcaggccctgtccggacccactctcctggggctcaaccgccagcatctcatcctcatggaccccagctcccaggtgggcacagctcttgcctcagcactggcctagggacccttgggctgttccatcacccacaatgacccctccccggagaggagaccagccctgctctctgctgcccccagagcctgtactgccgcattgccctgaagagcctgcagcggctccacctgctaagccctctggaggagaaggggccccctggcctggaagtcaactatggctcagctgacaacccccagaccatctggtttgagctgccacaggtgagtggccaggcctctggccaccttgcgaaggtggatgtgagggccttgccccagcatggcgtgcagtgggagcccaggcccaggccgatgcccactgctccggagtgctgtgggccggggcagaggcgaggggctggctggggagccctcttgtaacaggcctttctctgggcaggcccaggagctgctatacaccactgtcttcctgatagacagcagtgcctcttgcactgagtggcccagcatcaactgagaggagtgcaggccggggagagaagaggatgaggcctcccccggcccaagtctcacccacatggtctgccttggatgctatcagatcactgttctagaacctgcctcagcacagcccagccggcccacatgcaggccatgaggcaggggctgctatcacgtcaccagcaggcaaagaaaacagccagaccctctccaggacggcctggggccaaagcgggctgcaggaactcggctggggcacctgaggttgcccagtctgagggagatgcccacccgaccccaggctccgcccaggccccacattagcacaagcccaggcatgggagaaacagctgctgaggaaataaaactccctggagaaaagggctgtgtgcacgcctgcatgccccacaacaacacaactttattcctctcccaaacatctgtcaggcctggccttcctgagcaggagctgagcaggaacagggcctggctgcctctcctctgccacagctctgacctgggcaaggctggaagctggcatcgtaatggatgggggagtgggtggaggatctgagggtcccctgggtaggttccgataccttggacaggtgggcctcatcctgacttagaactcggggaggggccactcttccttccccttcttccagcagcagctccaccaccctccaccttctgtcctcgacatgtgtcccagaaaacccagccatgaggaccgctctgagaagggtctataggctttgcaagcagaaagaaaggtgggctgacctctgacctggattcagggggtgtctggggtcatccccaaagccaagtatggttggaaaggagaaggactgagaaaagacgatggccctggcatcagcaggtgaggcccaggatgacccatgctagaatctgggggaggacgcgggccctgcccagccagcagttggtcatctctgggggccacacaggccatgccagtcagcttcgctctcgcaccgggcccggccatggaagaagtgcctgatgaggttctgggcctcttctttcactacagattcagggtgggggcatgaggaggtgagcgttagcctcctccctgtagaccaccctcccaagtgcctcctggccctggcaatgccagcgctcaccgctccttccaggagaggtcttctgagtcagcaagtgtgagaggtggcgggcaaagcctttaaacaactcctggaa[184 bp omitted]gtggcgggtgcctgtagtcccagctactcgggaggctgaggcaggagaatggcgtgaacccgggaggcggaggttgcagtgagctgaaatcgcaccactgcactccagcctgggcgacagagataaaaaaaaaaaaaaaagagagcaggaccctgccctgacccccagagcaacccacggccatgacccaacggcaaggcaggccccagggaggacgggcgtggggctggccctaggcccactgtgttctggggctcaaactccctgcctcccacccccactacacccacataccccaggcatgggagaaggcagagcccactcactccccctaccttggaagcaaacttgccctccttgtagaaaggggtgaggcacttgaccacaacatttgcagcctccttcaaggagacgccaggagcggagagctggaaggggtcttgagccgtgggattcaaggtgccctgttcgctggccgagacgctgcccttgacctcagctacgacggagggcttggctgaggggcgtggcctcttctgaggctggctctctgggttctcctgagaagggccacagcagagggtcactcctgagctcccttccactggcctgctcccctcctccagaagactgggtccccgcaccagctgcctctctccagcccagcccatctgctgccaggtgtggaaagaaagctgattttccctgaccccttgagcagggcacaacagctcctggcctcgcccacagcccttctctcctccccaacagactcatccctgccggcacctgctgggatcgaggccgcttgcccttccatgtgtcctttgcaggggtgggctggacttcaggggtgccctggtctctgggcgggcaggtgctggtagagggaagagcaggcatcacagcactgggtcctggtggctccctcatcccaggaggcctaggagagcccatctcaggggtgagctctgagcttcagacgcccagtgagcaaaggggatgctgccgtgtaggttccagaagattctatgactacctgtacccttaccttggcctctccctgaggcactcctcagtctggggaggggcaggcgaatgtcccccggctccatcttcctcccctgtgtacttctctggggccatcgggggtccctgaaccccctcacaggaggggcaggcaccttctgcctctggggctgatgccagcagagctgggctttccacccttcggcagaagaagcgggcgatgctctgagaatccttgtgggccgctgtggctaggagctgctgtttcttgctagcccggcccttggcaagggagctgcccccagaggaactttttgccttcttctcaggggagggccccccatagtgagcgctgcctccagggacctcccctctgggcccagggaggggctcactcccatcctcatccaggaggccacagggccggctcgggggctcgtgctcgcctccccgctcgggctggggggcttgctccctgatccgagttgtctccatcagttccgtggccgtctggaacgggcaggagcctttggggaaaccagctcccacccgcttgggtttgagctgtaaatgtgagcaggaggagaggaggttcagcccactaggcccccttgagggcaccgctggctggagcagtaactcacattgggacggggctctcaggagtgtgggagggaagaggcaggcaggaccctggtggggagccaggccttggcaagaggtgcacccctgagggcagaggggaagtgaagcctttcctggtcacaggtctggaggccactgggccacagctcaccgagtacacatgggaggctggtggaatgtcatactcattgggctccgggggctcagcttgggcactgcagctcttggcactgcctcccatgtcatagggctgcccatccttggaggctctgtggatatcggccacctgggcagggataggcagggaggctgtggcacccgccagctcctcctgacatgccccacctagccctccttttctactaggcactacaagtgggtttctgtggccagtggccacaggcaactgaccactgggcaagttttaggcctcccatcctcacagggttggctagaaacatgtccagccagtggagaatggagctctacccccataaactgtctctggggtgggctggggagggtgagttctgggctgcctgagcccagagagctggcagacagcttctgcgtcagagtatggaggggcccctgcaacgaccctgggtccgcctgcaccaggcccaccttcttcagcacgctggccttgtagaggttggccaccttggcgttccggaatgtctcatgttccagctccacggccttggcccggaggtcagctctgtgggtgcaaggtaacaggcacaaggtatcaggtgggcctgggcttctccctgctgagctcttgcgggactccaggcctggtggggtaggccttgggcacagggattctgattagggctctctgagcaccctgtggcttactgtccctcagcagctgctggtagcacctaagttgtagccatgcctggccctggtggggttgtaggggcagtcccctggagtaggagaggtacaatctggggagaggtggcccaaacaggccagggttgacagggtcctgcagtctccaagggaacgagagcttggagtgctcctcagcccagtgatcgtggaactcactcatcagcggtacgtgttgactggcggttgctgctcagcgcctcctccagaagccgcaggcagtgctcccgtgcctggcacaggacagtgagactggtcgcatggcctcgcggctgggggagggccccggcgggtggctgaggagctgcccgtctcttaccttcacagtcagcctggggatcctcctgctagaagcctctttcaggggacagttctcatctgtggggggggggggtggtccttggtcctttcgctccaccttctgcgctctgaggtcccccacagcccggatgagaatcctccctccatgccccgggaagagcccacaagcctccaggaacatttctgtactgacctgggggtacaaattcttctatcttggggtctttgccctggaggacaacatgaaggacccatgaggcgtcctgccctgccgcaggacagtcccatccagcaccagagaaggggctgagaggtgcgagcagggggccaccaggggccccacacaggccactgagtgcctcccctcaccttgcgcagctgcatctgcttctgatagaagaggttccactcccgcttgtgggcctcatctctgccttcatccccgctgcctccagaaccttcgtcatacctagggacaggccaggcgtgagtggccctggcctgggctctgccctccccatgtgtgctgctgctagaacggcaatgtccctgatgtcctaccagctcaaggggggattgcggcatcgtgccacctctggtctggccctggcgccaagggaatgccaggcaattccagcgggttggagccctggcttctcggccccttacctgctgaagtccccgtagcccttgcggcctccctcatacagctcggggtcaaagccgttcccctgggagggcccgatgcaggtcttgctccagctgctgctgcgctccaaggcctccagccgcctccgcacggccgtggggttctggcagtggtcgcagcctttggcgcaggcaggcagcgcatccccgaagtacttggcaatggcggcatggcggcacctggagcaggcagcaccgcagaggtgaggggcggagagcccagtcggccagcgtctgttcacccgagcctgaatcgctagctgagcgagcactgccgcgtccggcaccatgccgggagccccacacccctcatctcatccaagctgcaccaggcatcgtttggctctccccactacacagatgaggacgataaggtgaaccaactttcccaaggtcacgtaacacatgggggtctcccgggaagcaggatgtgaaccccactctgtccagttactcctctgctcctcccctctgtcctctggcaatgggatgtagatgctggctctgccatgaagggtgtcttttgggtgacacacttcacctcctaaagcccatgcattcccgtcagtaagatggtgcagaaaggcacagccctcacggactgagcgaagatggctgaggtgatgtctgaagtgcattacagtacagtcatgccccatggaatgactgcacagccaatggtggtcccctacgattctaacactgtatttctactgtactttttctatgcttatgtgtgcttagatatgtgaataccactgtgttacaactgcatacggtactcaggacagtaacgtgatgtacaggtttgtggtctaggagcaacaagctgtagcgcatggcctgggtgtgtaggaggctgtgccgcttgatatttttttccttctcttccctggaattgctgtttgatttccctaagtatactctgtgaccgcacaatgacaagttaaatttctcaaaacgtatttgcattgctaaggcaggcacggctgtgtagtaatatgtcccatcatcaacccgtgagggtgtcacaggtggggcctttagccagggagacgcagcctcgcctggagtcctcctctcgtcttcctctgtctcaaccctgctgcagccctcctggggtgagcggcctctgcccatgctgggagcagggagcagcctctggctggcccacgaggctctgtcgcatctctgttccctctgcatgggggtggctgtcgacccttggggcagctgcagaggccgcaagaggggccatagctctctcaggctccttataaacagccattcctgccaccaggaacgtggcacagggtagggaagcccaagaggagatgctggaacacaggcagggctgtctggggtgccacatcccagggacaagaatagctggcattaactgctctaactagaactcctcccagtgtgagcactgctgcggctgcaagaagccctttgaggggctgcgaccccaaggcgcaggctcaaggatgcaaggctgattgcaacaccccggtaaggaagcagggcctggctgactttcttttagctgagtgaatgcagctctgaagcctgacctgggctgggacagccgaggcggccaccagagggcgctcctgcccccactctgctccaatgagtaaatgcaacaaatggttcatccccaggagtccgtgcgcccgcacagcggccgcctgtccagcctctgggaggctctggcatccgagtggtgtgaccacatggctggcttcctccccctgccctcctcaggccctgactcactggggttttgtgctcggactcaaagagctccattgacagcggggctggggtcggtttctctccacacagcctagcctgctgggaggcacaaccaggcaaatgtcacagggcccggcccctggactctggagccctgccctgacagctgggccaggagtgcggtcacagccccagcagaaggccctcacctcacaaggaacatgaggcgccttgccgggcgcgcaggccactcccaggtcactcaggattccaagttctcccccaagacgccttcagatgctgagcggcacaagggcctccccagggactggttgcaaagcctcctgctcagcttgagagggccaccagctccccactgtttactgttgttcctgagagaggccagagggagggaccagccagggagtggccagagggacagaaggggtggccttcctgagggcagggtgggtgccccagacctgagagcgctgcaggactcccctccacaggctcaggtggagcctccccagggtcctcctggccaggaaggcagagagccgacttctttcttcagctcccaacccaggcccagcccacggcgtgggagtcggggagagggagaggaggaggaaggaggaggagagagggagcttgtcttgtccctgagcagcgctctcagggcagaggtgaggcaccgggacatgaagttggaggacaagttcccaagcagggcttcctcgggctccccctcgcgacggtaatttgacacttggatctccaggacgaccaacaacaaaaaagccaggcagagacagcagctggctgtcagcagaggagctgggctgaggcgcccaggggagcagcggcgcccacgaaggaagtacgaggacagcacgtggaggctccgcgctggggcactgctgctcagcccccaacacctgagctcccaggtgagtggcaatggccacagaagaaggggggacagggagggagcagcaagggtcccctgcccccagggtgaagggccacagtctaccataaacacggagaggtcttcggggacatgctgggtcgcttccctgcagggaagtcagccagcctcctgcacacacctgcactctccctgctgctgggaccctgcactaggggagggctgggggctctgctcagagcgcctcctgctccgcctgctgtgcagcagaggggccccgagggcctgcttattctgcaagttcatttcagctcttttattcagggggcttaaaagagggatttggctgtccagcttgggagagaatggctgccggcctgctgagcctccctttttcccaggattagggcagagccctgtcgaggtcagcgcagggtctgcccagccagcatgcggcgcccccaggatgcagcaggactctgcccatctgtgtcctttcaggggcttggcccactcactgctggtgttctcagctcacggctcagcctgggtcctcctccctgggcccatctagaaccccataaactcctagatctccctctggtgatgagccttgaacaccaaaccaggaacctggaggactgactttcaactcaggctcaggtgggcagaaggtcacagaagtgaggctgggagggaccacgctggcaaccgggacctctgctgtgccaccgtgatgcacaggctgacatgacaccacccctaaggaagcaggacccggctgtttggttctttggggaacactgagagcagccctcctgggcagggcccgtgagccgaggctgcctactcctcctgccgccctgtcctcaagccagcgttaaagccaccaccccccatatgttttcctcaaagcaaacaagctggcatctagtgagaaacaaaaacaatgacccagggaaatgtggaaaccaaggactagcccaagtgttctcagctcagcagaggctgggggcttcggctggggctggtgtctggggagacaagctcctgcggtgttgggaggcgcacagtagggaagagtcaggccaggtcggggtcggggcacagcggtgagcctggagaccccagtggctgtcactcacaagacgccccaggcaggcaggtggggatccctgtcctgcatccacaggacacgagtggacagggtctctccaacacagtccctgaaccaggacggagggtgaatgaacagccagcttctgtagctgcagaaagagcgcctactgtttctaacaccagcagcagaaagcgcttcctcccgccctgggtggctacaggagcagggcctgccaggggttcaagcaccactttctacttccagttggagccagggcaaaaaggggagtcacccaaaggctcagtgccacaaataggggcatcccccccggctgctcaggcacaggaccctgcaaatctcccacaagtgtcagttatgcctccttctaggtggacctcaaacgagataatgcccaacagggcaagggtgactaaaacccaccatgacgaaacaacagggcagagcaagcagccctctggggccccgcgctgccaacacacctcgcttatcagtctcaaacacgccgcctgctgccagcccttcctcgtgaggcgcctggggttggagtatcagctctgcgaggaggaaacagggaagcttcgggaccaagtggcagctgtctggcctgcgggatgcctgcctgttgcaaggctccgtgtgccaggagatgccacataaaggaatgcttcccatccctccggctctgccagccttctctgccctgagtgtttcccctgtgctgaccgctactgcagccagggcacaccctctgaaggctccaagcagggctggctgggcagcctgggcagcaggagggcctggtggcagctgggctacactccctcttaaggccagagggagccaccacttgctctggcagccactcaggaacccctgaggaccctgagaagcctccaaccaaggcactactgagcgtggggttgggagggactctggttgccctggttcgcaggtgggcactaccaagcgtggggttgggagggactggttgccctggttcgcaggtgggaagtgtggttttggaaggagttgggtgaacctgagatagaaagacgggaaaaatatgggatcatcagtagccctcctgggcttccctgccttcctcctgccaaacctaggaagggaaaggggaggagaggtggccagcctcagagctcccatgttcccctcgccacagctgggaacactaaggttcccttaggagcagcggctggggcacatgccacacagtcacctgacggctgctggttatattgggcaccaagtgtcaggcactccttggcctggctttaaatagcccgctgggaagaccacctggggaccggctggaatgcgcctcctcctctttagagaacaggacccctcagctcccccacctgcgccatgaaggttcagtcgcgggtttacgctccaaatgacaagatatcaactgcaaaacaaagggggtcccggggttcctctccagctctctgggggcagaacagccacgtccaacggtcctacttctgctcactgtgtgacaggataccgtgagtacccctgggtcagaccctggggctgggtgaggctggccatgcctggctggcaaattcagcttccagtcagccccctagggaagccctgggcgcaaagctatgacactgtccacagccgcagcctgctgctgctgggaactgacacttttccccgctggaggccggggtccacccggcatgagtctgcagctctcccactttgcagcccctggaggaggctggccagagcttctcagcaacaaaccccacttttcctgcaccagtaaattcagcctcagtccaaccttcctcctccctgttctggtgagcacagccccaggtctctcgctcacaaggaaaagtgccccctgcaatctctccctgggtctctgggtgtggcacaagcgaaaaagctctccctgcccgctccctctttgaaggagtgtctctgctgggctacattaggccgtgtgggcacagtgccagtcaggctgaaaacgccagaccaagtgtagacagagagggaggggagaaaggcagcccagctcctgaaccacgcgcaaactgtcccgtaagggacactgtcggcattgtcgtccctctaagaatgagggaacctggaaagctggggcgtgaggatggcacggaggtcccggaaccaagaggggaccactgtccttgtgcaagcctgctccacctggccagagagaatgtcccattcagtctgaccagagggttcagtcctacactcaggctggctagactcacaagacctgtacctgtggtgacaaggactccaggtagtctcaaagagcctggtgtggccccggcctggtggtgatatgctgataaaagcagcttcagatccacaaatgtgggctggggctggccgagcacagccagctggcttccagggggctctcgggccctggctcctgtactgagcccactgcacgggcagtaccctcagcggggctgctcctggctatcttgctggtctaagctggagacaggcctccatggagagacagcgtggggcaccagtgggggtgctggctggggccctgtcctgctgtgtaacctcagagaagttgcttgctctctcgggtctcagcttccccacgtatagaaggaaggaggcgggagcggatgatctatagcattctaggaccctatgcctctcagtacatttgaaaactgagatcctcacctccacagaaacgcactcactccaggtgaggtgtgagaagctgggtggatctaactcagggaacccacggcttttgacaagaactcatctaattttccacggagccatcttctgcctgctaccctcatcatcacttaaaaaaacagctccccaggccgggcgcagtggctcacacctgtaatcccaacactttgggaggccgagggcggatcacctgatgtcaggagttcgagaccagtctggctaacatggtgaaatcctgtttctactaaaaatacaaaaattagccgggcatggtggcgcacactcgtgatcccagctactcgggaggctgaggcaggagaatcacttgaatctgggaggcagaggttgcagtgagctgagatcatgccattgcactctagcttgggcaacaagagagaaactccatctcaaagaaaaccaaaaccaacaacaaaaacatagctccccacctccagcttgcctaccttccttcagggcacacaccgcagacaccctaggacagacacccaaaaggtgttgggggtgctagtgacggtgcacgggggtgacagcccccaaagccagtgagacccgtcccgggggggcattctcgtgtgccgggcacccccctatggctgtctacaatgtgctgctagatggtcagtcctcccaatagcctcaaaacacgggcatctcattccatatcagagacatgaagcaacctgttcatgtcacaaaaggaagaagtggaggtggcattcaaggaggagcagctgaaaacactagagcaggcccctggcagagaaggaaatccagaaggtacatgccggctgccatcttgctcctgaagggctacgaggcagaagagggggcaaggtctaagtgaccacaagtgggactaactgggggccagcagggagtccgaccttctgcagtgggtgggctgcctcagcaggcggaggttcctcaccatcctgggtgctcatgcaaagaccacatggcctcaaggatggccgcaggccaattgcagggtggagggccccgttcgatgaccttcacggtggttctaaaccagctctgccaaggcagcggcaccgggagtgactggcctcactgacgtagccatctcagcgagaaccggctgagacctgggacaaggcaacgataattacagccaaaggtctggcaccagcccctggccacctgtccccaccaccacccctggattagagcaactgccttggtgaactggatcaggctgggttgggacaaggttgtctctggctcctctctaaagaggcaccagctccctcatgcccacaggagaggcagaaggggaaagccttctggagtggcaccttgggcctcttgggcaccctgagacaggaagaggctctcctggggcaggggtgggagtggagaggactttcctggtcaggctagagaaacagatgacgccagcaggggaggggctggcttgagcaacctgggcctcctgaccccctcccaacagacaggacagaaaccctggcaaaacctggagggacacggtgcggcctccccctctggcagaacaggcatgagtgtagaaactgggctggtgggagaggttggggggcctgggggacaggggggcagttttcacctctgactgaccctggccagaagccccatgaacctgctctcgggagaacctgctccttctgtccccacattgatggaaggcaagagtaccagcttggcatcctatcccagtctccccaccccgagggagctgtgccagtcccaagcacccaggcaaaacccagtagtggtacctcaagacaagggaatggaacagcgaagccagaaaccaccaccagccgccgccttggccggcagcccccgaagcaagcccttggtctcactgtcctcaccggcttcctccaccctgagctgtgtcagctgggtggggactgagggccaccactaggtggaagtcaccaggggtgcaatgtgtgagacctgacaaacttgttctgcgggctgcggatgggtgcgagggtggaatctcggtgctgcgacgagtgtggggccagccgtggaggctccaggtgttctctctgccccagcagagcccggcaggagccccaacaggaagccagcgcggcatggctgccaccgacttcgtgcaggagatgcgcgccgtgggcgagaggctgctgctcaagctgcagagactgccccaggctgagcccgtggagatcgtggccttctcagtcatcatccttttcacaggttagttggggcactcagcaccccatggctctccctggcatctgggagagaccacaccatggtgccagccagagggctggcagaggtggcgggtgtctgccggatcaaggaggaaaaccagttgtcccttgggggaagccaagggacttccctcatcctctgatatgctgcttgggtgatgggcggtgctggggactgggcccagcagtaccccgggatcccaaacgcggggatgacgggagccaggcttgggcagtgaaagagaagacacaacatggaggaggttggccctggcggctggcatggggaccgtccgcacctctcaccagcctctcggatctttctgacctccaccaaacctgtgggggaaagaccctggcaggcagtgggtttctctgggaggagggtgggcatcctttctctcccccaacctgagtcccgtgctctctcccggccctccagctactgttctgctgttgctgctgatagcctgcagctgctgctgcactcactgctgctgccctgagcggagaggcaggaaggtccaggtgcagccgacaccaccatgacggacgggcgatggctgaggagaagctggagaggagatggccaatgccatgacacaggccatcagcctggccctgcagcccttacccctcaagaccaggctcccctggccccagctctggcccagcccaggtacctggacactgacaacttgagccctaccaaggaaacaagggctggtataggtgcaaacctctcatctgccagtggacactgggtgctggggagtcagctgtttcaaagactgggtcaactgcctgggcttcttcgcctacctgcactttttaacaaaacaaggaagtaggggtccccataccttgatggagaacagtccccacctgtgggcaattggcccttggggctctgctgatacatgccaaagaggagcaaggcaatcagaggggctttgtgcaatagcttctgcatccgagctcccgccagagcgtgagcatgtcagtattctagtccagtatttgccagtttccaagtaaaagcttttgtgttacgtgtttctgcggtgccggactccctgaggttgggctgggctctgtacattgggagggggtatggctggtgcccgtccttcccaggcctctgctctccctgtgcccacgaaagctggaaaaccacgcagagaagcatgccacacaggcggttaacaccacgggaccagtggacggtgccatgaaattcctgtcatgcattagctgctaatgagctctgccaggctgaggcactactctgcagagtggcagagactgtgtttgcccaaaggcaggagctaagctcaggaacagcactttactctgtcaactgcctgcacctttggcctgcacatcccacactagcagactcagaccagtgggtcttcacaaactgccagaggaaggccctaatgtcacctgtaacctgcctcctgaccctgtggccctcccccatttgtgtgctgtctgggctcacaccctcaccctgtcagctgcgtgactcaacttccctaagccgaactcccccttggtgaaatggagcaaatcctggtactgcttcctggggtttgctgtgaggataaactaagatgacctatgtctagcactcagctcggtgctgggcatatctttagagccccatcaccatgacccgttattatttgcccctctaaacatgggaccaaccagggcaacagggacccattttaaagactggtcttgctgagaagcagcacctttccttccttaccccctcctttcagctgagtttttcttccagagaactttccaggtagagctacgaacccaggagtgaggggaggggaggcacatggctccagaaatgccaatgggtccagacagagcatcccgaggtgcctccccggggcttccccagagcctcaagaagtctgtgtttttcacatgcttccatcatcttggcctgcgtgacccgtgctctggccacctgggagcagagccctgtctacctgggaaacatgtcatggagaggggatcccagcccctgccacacccccgccatttccagctggcagtccaggccacactggcaatagcaggcagggaggggaagctctcaccctctggtttcactttctagtgtccacggacttgtctgacaggtttaggttaaagacccagagagtaagtgttttcatacaaaagaaaagaaattcaaaaatttgtccattctcagccccctccaaagaataggattcagaatgatgacgatgatcatgaggaggaggatgaagatgatgatgaagatggctaaaatttactgaggagttacacatactcagcattgtcttcagcattttggtgcagataaactcaattactcatcacagtacctccatgttgaagataccactattacccccattttagagatgaggaagctgggcctcagcgatgttaggtaacttgtctacattcaaccagctgaaaaggagcagggcctgcttgagtccagcctatctggctccagagcctctgcttaccacacccagggctctgagacccagaacttggcctcctggttgcagtacagataaggctctaatccattatcctccatcgaccaaccctacacccaaaacacccacaccccaaactctgtctcaaaataaccttcgcaggactgggtgggacccaacaggtaagagctggggtggtgcccaatgaggcacccctcccggaagaaaaacacagggtagtggacggacaggaaaccctgcatttttcattcccagcaccaatggctggagggtccctggaagccttctgtttgggagatggccaacagggaagcagcccaattcctgggtgacttttccataagccagttttcatcagcataagaatagccctgctccagggcggctgaggctgaggccctttgttagaaaatattctgcttccccagcccagctgcggagaggtgggaaccacagacagccctgggcacagacaggccgaatggccgctctagggcaggcggtgaacaactgctgagtccgcacaggattcggtccctgccctcacaggactcactcctccctgctccttggccaactggcacacaccaggcccggctgtcgggccaactccttcacaggcttcaaacccactgagattaacaaaccagacctgctctccgacagcagcctggcccgctcctttaagaggcagcttcttgtgccggtcttccctggggaagatgggcatggaaaggtggcagcagttgccccactgtgggaaagaataaacagaaagatgctgcagacctgggcggcctgaagacaggtgggggccatggaaggggcagccatcaggctggtttcaggtttagaggacgtctgacttggtcaccacctctctgttcccgccactgtgccatcctggaccatgccaccatcaatgcttacctgtggtcactgcagcagcatcctaagtggtccccacaatcatgtcgccagcctcttcatgcccaccccaagctgtgccctctgcttccgccacagggcaggctgctctcggctcctcaaaagggctgcactctactctgaagacctgcgtgccacactgtctgtacatcatgcctgattaaaagctacaatagggatgggcgtggtgactcctgcctgtaatcccagcactttgggaggctgaggcaggcagatcatttgaagtcaggagttcaagaccagcctgaccaacatggtgaaacctgtctctactaaaaatacaaaaaaattagccgggtgtggtggcgcacgcctgtagtcccagctactcgggaggctgaagcaggagaattgcttgaacccaggaggcagaggttgcagtgagctgagatcacgccaccgcactccagcctgagcgacagagtgagattccgtctcaagcaaacaaacaaaaaacaacaacagaccagcatagtatatcacatgcatgtaatcccagcactttggaaggccaaggatccttgagctcgggagtttgagaccagcctgggcaacatggggagaccctgtccctacaaatataaaaaaaaattagccaggtgtggtagcatacacctgtggtcccagctactcctgtggaggttgaggcaggaggactgcctggggcatgacagtggcactgcactccagcctgagtgacagagcaagaccctgtctcaaaaaaaataaaataaaaataaaaaatgacaataaagccacggatacaagaatctcattagaaaaacttggcagagagtatataaaagtttcctcccaaccgggcatggtggcacacgcctgtgatcccagctactcaggaggctgaggcaggagaatcgcctgaacccgggagacagaggttgcagtgagccaagatcacaccactgcactccagcctgggctacagagtgagactctgcctcaaaaaaaaaaaaaaaaattatccaattggggccggcagttaattgaaagagctggtcaaagcaacttttgttaaagaacacctaagttctctacacatctattacttttttacatatctcacattaaatggaaacatacaccttttccttggccggccttcctggccttttctctgagtgtgggcttgccaaccagagctcctggattgctatcttctagttttggttgagtgtgggcttgccaaccacagctcctggattgttattttctagttttggtttctttaaagcagaacaaaaacttaaagtcattggaacttaaaggcaaaggaagctgggtgtgaaaaccttctgggtttttacaaaatgtccctgatgtttagttatcatgtctgcatctttttcaacaggaacattatctgagtgattccaaagtcatcccaaagtagtcaataggtatttctagaaagaatttctttctccactcgctctgaggtgcagcacaggtgcttcagcgctcagactgtgtgctgctggattcaaactccaactcagttacttactagctgatgacctcggctaagttatttaacctctctgtgcccgttccccacatgtaaaattggggtttcagctattattgttgcttcattggttcccgggatgttaaattcaattatgtaattacaagtacaactgccatgaacaggtttgggaaccaacacttgactcttgataagcatctgacttaactgacggagctgcacgcaaagggtgagctagagactggcccactgctgtgagcgttcagcatgccaagggccttagtcagtaagtttcacacaaggaaacagaaaacatcaggtaacccgggtcagtgacgcccatgatagttaagaacgactgttctaaatctgcctccatctgtcatccaaccctggccacacctggggagaatcacctggggatgtgtaaacaatacgacatcctggcaaccccagagactgatataagtggtaccaggtggggcctgggcatttctcaaagctcctagatctttaccagctgggataagcacccgagggctagaagggaagcccttggagggcagggcccgcctctctgatctcacaactggacacacagtgcctggcatggttcctggccatagcgggccctcacatcctagcttttaaaggagtatatggtggccactaggtttcaagcaccagggcacaggcttgatcccctcttcccagcttccctattgtgccagtgggcagaaaccaaccacacaatgttgctgaggccgtgcccagggagcagacaaaggcaccaatgggaagcctcagggggggagcaacacttcccccagaaacagttccaggaggcaccaggcgccagccagggctgcagttaatcattcaccccacaacacaggaagtgagccctacgccagtcccagccccagggcttcctgagctcggggcaggtccgcagtccacacgtcacccagacagaggacagcccagcccagccacaggtgaggcggcctgatggcctggggcaaaggccctcggtccagtctcttccccgtccaccccaagtctgacttctctcaggagggactcatgaacacgtgccctgagcacccccaaaatgacatcacacaagggcagaaaggagctgaagggggaacgtgaaaggcagaaagggagccgtggttgccaggcaaccagccctagcccacctttgtttgtttggtgacagcaactaaggtctggtcagggccgcttggccacgctcatgccttttcctctcaacagttgcttctttgagtcagggtgcagctctggtcacctggcggcctcttcagctcagccctccacaaagtgtgagcctgaaggaccaccctgaattgcccttgtaggacccagaacagctaccagcagaatcaggtaatggctccctccttctccacctgggctgccctcacctggctatgggcttgcagtctgcgataaggagctccgcttctagaggactcctaagttctattctcagctgctccaaggaggctaccgaggcctcagctggagttggcccctcctcggctcctatacgctctctcaaatgcctcccaaatgtttggcagttggggcaggaaaaacagggagactctatcatgatgctttttagattctagccaagtaggtctcagggatgagagagagtccttgctcacacttgctactcaggaaagaaggactggagaatccaggggcatcccctaggaagaatccagggccccacttcttgcgccagtcctggctcctgtatctagagcgggggaaatgccatttgctgctggctgcaggcatccagcacaaagactctagccctttcatgtcccctggctgccaggcgggccggctgctcacagaggctgctacagaggctggagtcggcgggcagagcatagcacctgggacagggcctgggagggctgcctgcactcaggtcctctgtccctcttttccagattctcatggaccaactggtattcaaagagacaatctggaatgatgcgttctggcagaacccctgggaccaggggggcctggcagtgattatcttattcatcaccgctgtcctgcttctcatcttatttgccatcgtgtttggtttactcacttccacagaaaacactcagtgtgaagcgggtgaagaggagtgacctgacttgctggggactgagatggcagcaggggaggcgagctgacctgcccccattccagtggtgggccccttcgcggttccctctggctcaggggccaagccctggtgtcttcctttcccatcaggaaaaagtctagtaaaatactgtatctggcttagggttggtcagactagtaagatggggaggctggtctgagaccaattctggctccttgaccctattgtttttagggttccccgaccagaaccctaaaagcacatggagaggatggctccactgcctcaggtggaaggagctatggctaacaaggttctctaacaggctcacaggcccagccagcaatttcacaaatccttgacagagaaagacacaaccaaatgaaataaaaattccttttcaaatctgctaacttgtgagagctcatttttaatccagatagagccaccagagcaagcttcccgaacaaagccgcaccggggcctgcacgctctagcctgcctgtctccagccatcttgcccaccccatcctgccctgcccctgggttctcagcgtgtctttcagttcttgaatatgctgtgttctctcccaccacagggcctttgcacatgctattctcattgaccgggatgctctccctcacaccacactttactctatggcctagttagtccttcctcatcctttgtatctccgtttgaacctgactccctcaggtaaatcttccctaaccctcaaggattagggtaaggccacttgttttatactctcgaaacaccatttacaggacttatatgtctttgttgttgttgtttctttgtttttgagacagagtcttgctctgtcacccaggctagagtgcggtggcgctatctgggctcactgcaaactccacctcccgggtcacgccattctcctgcctcagcctcccgagtagctgggactacaggctcccaccaccgtgaccggctaatttttttgtatttttagtagagatggggtttcaccgtgttagccaggatggtctcgatctcctcaccttgtgatccacccgcctcagcctccaaagtgctaggattacacgcatgagccacggcgcccggcctttttttttttttttttttgagatggggtctcactcccatcacccaggctgcactgtagtggcaccatctcggctcactgcagattcgacttctgagtttacatgatcctcccatctcagcctcctgagcagctgggactacaggcatgtgccaccatgcctggctaattgtgttttttggttttttttttttgtatttttagtagagacagggtcttgccatgttgcccaggctggtcttgaactcccaggctcaagcgatcctcccacttcagcctcccaaagtgctggtataacaggtatgagccaccatggccggctctgggacggggctatttctgcccactagtgtatcccccatgtccaatgtgcctggcacagagctggcatcagtcaatatttatcagctgaataaatgaatgaatgagtaaacacacagagaaacaagaagatgccaggctgttgggcacccccagccccaagatcccaggaaacaacagggcccaattcaatccaggtctaaacacaaggctgctcttccatctcaagatgccgaggcctcaagctggaggttgcttcaaacctaataactgttccctgtgacactaaaagacactcattgttatgaataatcaaacactgctttttcaaggctgcagcccagagaaagtagctacagatagagaagagaggaaaaccgctggctgccacagccccgcctcattagttaactgacctgagtatcttttctgctggtcccactcccatgtgcctcagaccccacaacaaactgacaagaaacctacagcttcctttgcagaaatgcacccacttctgctgagcccaccccactagctctgtccctcactgccaggtgcccgccccaagggatcgctggtgggaggctgcttcgacctcagcctccaatgagaactattcttaggaagcaaatatctggtggagaaggggctttttctttgtgctacacgccagttatgcaataaagaaacattcacttattcaaagaacagtagccaatacagacataccagcagcgtttattccagcctgctgcctggatttcagaatcatcacatgtagcaaaggagacaggcacgaggctgctcaagaggcagcgcaacaccgtcacctggactccttgagtccacagatgcctggaccccagcccctggcaaccaggccactgatgcactaagaagtcccagctccccggaaggtgacaggagaaatgaaggcagaggcccttgggaggacctgttcccttgcctggcaggcggagcagaccctggggacaggcagagttaaccctccagagagcattccagagcctcagacagccccagagcttttttcagcaaacaggactcacaatgaacaggaacacttggccctttcattcctcaccagaaataagagctctgctcaagaagcctaagaaggccaaatttagcaactcccatattaattgtgcttgaaaagggctctggtcgcaaaggctgcaggcaagggtggtcctggcactgcagccgaccacttttgctgggcgtggtcttgccacagaggccaaattagagacagcagtttggagaagaaaatagcttcagtccagaagccaccgactcactggtcaacaggaggaggtggaaataaaaacacacagcccaaagagtttctctgatttcctcgcttttttcttgcaaaaaccaagatggcccaggtgtatgcaaatgaggacgccactgaaaatcaggagacgggtgtttagtggcctcagtctaccatgagcttcgtgactgtgacctctctggacctcaatttattcacctctaagtctgaagcaatcacgtcagcgtcatccgacaggatcattccatgagatgagatgaatccaagagctttttagaccaaaatgtaaaaactcctcctgggtgtctctcctgcaggcactcacagctccgcatgcctggacacaacctgactacaccaagcagccctcagactctttccgtggcccctgccccatcgcctgcagatgcaggtaaaacagatgcgtgagttcaaagcacatgactccccgaggtaagtggggccacaggcttctgtgtgggtcctggataagggtgaggactactcaagtgatgccagaagtcccagctcggtggcacatgatgaccacaaagccgatggctcagagctggtcacatcccttggaactgagtggcttgtggggccagccatcccagaagagggtggagtggagggaaggacaccactcagaatactgagcaaatccccacactgcgagagatcccggggcctccaatagagaagagcaaggtcctgacttccacactgcccgacacaacagcctttgcaggcaggtgtcccttggtagcctacgggctgtcttatgtcagctgcttaactagggcgtgccggggaagtaaatgatctcactgacactttgctccacatataaaataagtcacttaccccagttcttcacagaaggtcaccagggcatcaaaggccatgatagtggctttatcagatgctttgtttcctctcttttcctggggacaaaaaatgaccacttagcaagtcttatagaattggactaccttagagccacaaaaagtaatgaggaggccgagtgcggtggctcacggctgtaatcccagcactttgggaggctgagccaggaggatcatttgaggtcaggagttcgagaccagcctgacctacatggtgaaaccctgtctctactaaaaatacaaaaaaattagccaggtgtggcagcgcatgcctgtagtcccagctacttgggagactgaggcagaagaatcacttgaacccaggaggtggaggtttcagcaagctgagatcatgccactgcactccgtctcaaaaacaaaaaaaagtaacaagggagaaaaatattaaatgacagtaataaagccatttacaaaagtgtccccaaacctgactatgtatcataacccccagactactgaactgaattttctgggatgagcttttgagagtttccgaaaagcttctcaggaggttctcatgcaaagggcccacagactggcatttaggaagcgctatataatatcacctattttaataatagtaaatacacgcacaaatgttgtgaacttaacaaatatgaacacatatacttctgtgtatattggagggagatatattaaaaggttaagtgactcttcttgataagcttaaaacatgaatttaaaatacaatttaaaacctgtaatcccagcactttgggagactgaggtgggcggatcacctggggtcaagagttcgagaccggccttgccaacatgttgaaactccatctctactaaaaatacaaaaattagccaggcatggtggtgcatgtctgtgatcccaggtactcaggaggctgaggcaggagaatcacttgaacccgggaggcagaggctgcagtgagctgagatcgtggcactgcactccagcctgggcaacagagcaagactccatctcaaataaaataataaaataaaataaaataatgcttgacctgccgactcagaaacccatgtggggtgggggtgggcagctgccagctacaccaggagagcaagattcccaagcccttcagttggcacccaaggggccagtgtgcaccacttggatcacacaaccagaaaacaggaggaccccaaaggtttcctgagtctctacttaccagggaggctgtgtgcggccctgccagctcatgcctgagcacagcatcccagatggggcagagcagggtacggctgggcaggggaggtgggctctggaaggtgctaatggtagcagacagggtgttgcctcctgcctgcaggtagggagcaccctgaatgagcgggctgagctgggctggtcaccaggcctggacccacagctcctttggctatggactaatatcagaggagtggcttatgggaagtggatagcaggaagcgctgaggcctggctcctgagcgcagggtaaagctgggggaaggagatggtactgtgaaggcagataaaggggcaagagcctcaggtttctgtcccccaccccacttccctggggctttccaaaccaaagcctgcaactaacttaaaaggaagaaaaagcacttaagttaccaacaactaccaaactcccccaaagcccctctcacaaaatccaaactgttttctcatctccactcctgcctcccccacacaatatagtttcctgttttctttttaaaatgttgcctgccacctctccacctgggaaacccaaggcatgactgccggttgctggtgacaggcacacagcaggcagagccccatctttggtggtggggcggagggaggtgggggcaccagtccctgccacatcctcaatccgcagacactcatcagccagccttccctttggctcccactagaggggagtagggcaatagcaggtggtccccacagctgagcaacaacagctccaggccttcccaccaggaagacctctgcacccttatccaattcaaagtacaggctcaccttgggccaggaaccactattaggtaaggaatgggcactatacatttcaaatgtggacacctggtcagggcagtggaactctaaagatggcagccaacttccttccttgcccattcctggaggtaattcccctcttagtgaccgaagctctggtgcagctctgctcagagaccgttcctggcttcactctgttataagcctgtctatggacttgtggctgaatcaactagcagaatactgagcatttgtgagtgatgtgattattcatcagcggccttttttgtgtacatgtctatttgccaacatatccttttaaaatactgtgaattatttaatacagaaaaggaaaaaaagagcccgggcatggtggcttatgcctgtaatcccagaactttgggaggctgaggtaggtggatcacttgaggtcaggagttcgagaccagcctggccaatgtggtgaaacctgtctctactaaaaatacaaaaattagccaggcgtggtggtgggcgcctgtaatcccagttacttggggggctgaggcatgaaaattgcttgaacctgggagatggagaatgcagtgagctgagattgcaccactgcactccagcctgcacgacaaagactgtctgaaaaacaaaacaaaacaaaacaaaacaaaaaaaaaaccccaaaaaaacaaaaaccagacactgatatctgagacatcatctattgagtttctgctttgggcaggtaactcatccccaccaatacacacaaatacacacagattctgtacccccaacttcccaatatgtttacaacacaatttcttattaaatccatattttccttattatgactatgtcaacagagttcacagctaaaccgaagtgattgcatttttatatttcctgtgatcacatttcctttcttgtgtaactgtgtttcccctgaaatagctttgtttttctccatttacttagatttcagtatgttattaattcacccctaactgtcctaacataatgaacaattcatttcgataggagccagagatgccagcttccactttgatgtttagaaccttccttcctggagtcttctgccccctagtgcaatctggaccagttttccctaggcctgggacacagctgtctttccggactactctccaatattgtcctgtgccaagacttactcctgggtaagtttccatctttgctttctaggtttactgcctctctacaatggagaacatcctttaatagcttctgagacatgacataccaggggaaagtttttgaaacctttgttatctgaagatgtcttttttttccttcaagtttccacatacagcattgcatttttatttgtttatttatttatttttttggagacagagtcttgctctgtcacccagtctggagtgcagtggcatgatcataactcactgcagccttgaattcctaggctcaagcaatcctcccagctcagcatcctgagtagctagaactacaggcgcacatcaccatgctcagctaattttttttattattattagtttttgaaacagggtctcactctgttacccaggttggagtgcaatggtatgatctcagctcactgcagccttgacctcctggactcaagtgatcctcccacctcagcctcttgcgtagctggaactacaggtgcataccactacacccagctaatttttaaatattttgtagagataaagtcttgttacattgcccaaactactcaaactcctggcctcaagagatcctcccatgtcattctcccgaagtgttgggattacaagcatgagccacctcacccagcctaacatttttaaacatgtcatttgataaatttttctgggaactttcttttcatattatttgcttttcatatcctttgttcaagcgattttcctacttc[134 bp omitted]ggcctcccaaagtgctgggattacaagcatgagcccctgcgcctggcctttttttttttgagacagagtctcgctctatcacccaggctggagtgcagtggtgcaatctgggctcactgcaagctccgccttccgggttcatgccattctcctgcctcagcctcccgagtagctgggactacaggcgcccgccacgacgcccagctaatatttttgtatttttaatagagatggggtttcaccat[146 bp omitted]gctggagtgcgtcctccactccatggtatgatctcagcttaccgcaacctcaacctcctaggttcaagtgattctcccacctcagccttcccagtagctgggactacaggtgtgtgccaccatgcttggctaatttttgtattttttttgttagagacgggcttcactatgttgggccggatggtcctgaactcctaacctcaggtgatctgcctgccttggcctcccaaagtgctgggattacaggcaagagccactgctcctggccccagagcttgttttctcttggtgagattttagttttcttcatctaaatcagtggttgtcaaccctggccatatattcaaagcaactggggagctttttttggtttattttgagaccgactttcactcttgttgcccaggctggaatgcaatggcgcgatctcggctcaccacaacctccacctcgtgggttcaagtcattctcctgcttcagcctcttccaagtagctgggattacaggcatgcgccaccacacctggctaattttgcatttttttagtagagacggggtttctccatg[142 bp omitted]acttattcctaagtattttataagttttattgttgtaaattaagttttttttttgtttctatttctaggtatttatggtaatgtggagaaaagctactgattttttttttccttggctctcatctgactagagaaaagctactgatctttaaactatttctcttatattcaaccagtttgccagattttcttatgattgagtagatttctagtagggtttttgtgtttctaggcacaatgtgttgtcatttctacctgctgttgtcttctct[131 bp omitted]gctctgcctcctgggttcacgcccttctcctgcccc[214 bp omitted]aagtacttataggctggacacggtggctcacgcctgtaatcccagcactctgggagcctaaggtgggaggctcacttgagctcaggagtttgagaccagcctgggtaacataacaagagctcgtctctacaaaacaaacaaacaaaaaacaagggaagattaagccaggtgcagtggcacatgcctctggtcccagcgacttgagaggcagaggcaggaggatcactcgagcccaggagttcgagggtatactgtgctatgattacgcctgtgaatcaccactgcacttgagcctgagcaacacagagagaccccatctctttaacaaaagaaacaaggcagtactgatcttgaccacataaaataacatgtacacaaaagacaatattaaggccgggagcagtagctcacacctgtaatctcagtagtttgggagtttgaggcaggaggattacttgagcccaggagtcatgagaccagtctgggcaccatagtgaaaccccatctctgccaaaaactgaaaaaaaaattagctgggcgtggtggcacacacctgtggtcccagctactcaaggtgggaagattatttatggccaggagttagaggctgctgtgaaccatgactatgctactgcactttagcctgggtgacagtgagagaccttgtctcttaaaaaaaaaaaaaaaaaaaaaggtgggcacagtggctcatgcttgtaaccccaacactttgggaggccgaggcaggcggatcacgaggtcatgagatcgagaccatcctggccaacatggtgaaaccctgtttctactaaaaatacaagaattagctgggcatggtggcatgcacctgtaatcccagttactcaggaggctgaggcagaagaatcgcttgaacccgggaggcggaggttgcagtgagccgagttcatgccattgcactccagcctgagcgacggagtgagactctgtctcaaaaaaaagaaaaaagaaaaaaagctagtattaagataatttaaatatttaaatatttagaaagaaaaagtctaacctagcttgttgtaagctgcctacctaaccaatacgccatttccctttgctatacttacaggttgggagcagcctcctctagcttacacaagcatcatcagagttcagaaatcagcttcacaaaactggagagtggtgggtcagactgaaagaccttctactgcccaagccttacctggagttttgctacttccttcctgatcaggaagctgacttggtcccggtcattcctggagtaatagagacggcaccaggaaggcttcccatccctgccagcccggccagactcctggtagtacccagccatagacttggcaatattccaatgggcgacaaacctgtaggatccaaagggacaagcagcatgagatggtggagaagctgagtgtcctttggaggagtaatcatgactaggagagcagggaggccagcagatagggagggagagggatagtcccagagttagaatagttaagacacctgtagcccatcagcacgtctcccttctagaagcagcccagcttagaggccacagcaggagttaagggggggcaaatccagcacatatgaggggccaaaaaactcagccagggcccagtggaaaaaatactggacctaaagaaacaaaatgaggctctgccacttatgagctatgcaaatttgaataagttatttataacttctttggagagggaaaggaataatatttattaaatacctcctatgtgccagtttatatatgtctcatttaattgttagtcaccatcatgtgaggtagcccattctccagaatatgagattcagaaaggtaaatttgtacaaggttacacagtaaagggtcagcagagctagaatttgggcctaggggtgtctgccttcaaaactggctcttaacaagataccacagacccaggattcattttatttattttgcttgttttttattttattttatttttagatggagtcttgctctgtcaccaggctggagtgcagtggagtgatctcagctcactgcaacctccacctcccgggttcaagcgattctcctgcctc[134 bp omitted]gcctcccaaagtgctaggattacaggcataagccactgtgcccggccttgttttttatttttcaagacagggtcttgctctgttgcacacgctagagtacagtggcacaatcacagctcattgcagcctcaacccccggcctcaagcaatccttccacctcggcttcccaagtatccaggactacaggcacatgccactatacctggctaatttttaattttatagagatggagtcttgctatgttgcccaggctggtctcgaactcctgggctcaagcaatcctcccatctggtcctcccaaagtgctggaattataggtgtgaaccactacacctggcagcatacccagggttcgaactctgattctgaagtcggtgttctttcaaatgtaacgcactataaaatttcgtccctaactcagggtcactgtgaggttcacgaagaccatgtatgcaaacatgctccgtaaatcatacaaggtattattatttgtcgttaatcagaccaaagggcttcaggctgtagcccaaaacgcctcttgaaggtcatggccagatataaaagacttcctattagttgccagtgtggggctaggaggctgggatgcaccccgactcttctagactattagtaagcaataaaaaggaatgatggttctaagagccttgcctttgaccttccacagggagtagcttaaaatacagtcacacattacttaatgatgggaatacatattgtgttttggtttttggtgtttttgtttgttttttaagacagggtcctggtctgttgcccagcctgaagtgcagtggcatgatctcagctcactgcaacctccgcctcccgggctcaagcaatcctcccacctcagccccccaagtagctgggactacaggcacgcaccaccacacctggctaatttttatgtattttttgtagagatggaggtttggccacgttgcccaagctggtctcaaactcgtgaactcaagcgatccacctgccttggcttcccaaagtgctgggattacaggtgtggaccactgtgcccggccagggatacgttctgagaaatgacttgttaggcaatttcatcattgtgcaaacattacggtggatagtctttacataaatctagatggtactgcagcctgcacagctaggctgtaaacatgtatcgagtgttaactgcactgaatattgtaggcaactgtaatgcaaatcactaggccataagaatttttcaactccattacaatcttacaggatctcagtctatgcagtctgtcattgaccgaaacatcaacatgaggtgcatgactatagttcctttattcccacctcctcataggatccacctactgagatgtgagtgaacaggactatgttaaaggacaagcctgacagactgcatgctgccccatcctggggggtgccagaaccatgccgtgcagtcacctgggagcaggccgcacaggagctgtcagcattcaggctgtattctaaggactctctcctggagcttccttcccctctagccctcgaaggagcacatgcacctggtcctttgggcacagcactaggcaatccaccctgagccaggcccagaccaggagggcagggcaagaaccaaagctcacctgacattggctttatccactcccatcccaaaactaatggttgcaacaattacagggaccttctcctccatccagtcgttctgcaccagcgttctttcagaggccttcagccctgtaaaggaggggaagatggagaagggaactcacatttcccttgggtttaccgggggcctattttgggtttgacactgtgtgctaggcacttcacaaaccctgaatctttcacttcccagctgtctgaccttaacatcaggcgcttaactttactgagcctcagctgacaggcacaaagaccctagcccatgtgtggcacagagcatttggcaaaggttagggccatgattcaagcccaagtccgttggcctccaaagcctgtgctcttcctacaacaccattaccttggcttgtaaaaacgtatcacctgctgctgggtaggcatacagtgggaagaactcaggagtcacaattctcattttagacctcattcatgtctagactccttttaggggatttaagtgtatcactttagctctgcctgagtatctgcaataagatggtgggtcacctgataaccaggatctgtaaagaacaagagaccagctaagaagcctctgagggtgaagagactcaagtggcctgggtgccccttacctgcatggtaagccttggcgttcacacccctgcagctgagctctatggccagctgttcacaagcctctctagtcctgcagtacacaatgccgcagccagataactgaatggggagatgcaggaagaaaataagcatagcaagaacagaacaataggcccagtgtaatgcaccctgctctaaaagaagctctgtgttccttctctcgtcggcttcagtctcttctgaggcaggacacccagtgaggctctgtcactttataaaaagcaggaccaggctggatgcaatggttcatgcctgcaatcccagcactttgggaggccaaggtggggggaatcacttgaggccaggagttagagaccagcctgggcaacacggagaaaccccgtctctgctaaaaatacaaaattaaccgggagtggtggcgcatgcctgtaatcccagctacttgggaggctgaggcaggagaatcgcttgaacccaggaggcggaggttgcggtgagccaagattgcgccattgcactccagcctgggcaacaagagcaaaactccatctcaaaaaaaaaacaggccaaaagctgctcaaaactcaacctgtttaacttctctgcctcctcttcatgagctttgcatgggtctgcagaggcatcacacagactggctggctgcttgccttccacaggatccagaacaaggaaaccctggtaaggaggacaatgccaggaaaccaaagagacaactctttttgtgcacaagttttaggaagcctggctgagaaagctagaaaaaccaaaggtcttagactaatctccatctccatcacatcgcaccccactgctctaacagctgcttggcctccacctcaatgcctcacccctttatcagcctcctgtccaagagccttaaggcagaagtccttcaggttcccatagggatcagaaatcagttccttgaattgcacatcatagaagaggttggcccggaagcagggagtcttgaagatggcaactggtttcttcaggtgcagggcagcaaacacgtcctcttggacctgtggggtggctgtggcggtcagagccacacaaggggcatgtcccaggcgggagcgcagggcacccagacgcaagtagtcaggacgaaagtcatgcccccattgggaaacacaatgagcttcatccaccaccaagtaagacagcaggtggcgggacaccagggagttcagggtgggctggaaggaggatgaagctgccatctctggggtgatgtacagaatcttggtctggggcttttctcgctccaggtcagcaagcagctccttcctttcctgtgcagagagcttcgagttcagggaacttactcgtacctttagggttagcaagtggtccacttggtcctaagagaagagaaagaggctgtaactggccctcaggactcaggtaaacatcactgcaagtccctggaggatttcccagtcataaactgtcctcctcccaccctccaatatatattctctttgcatagaagtagtagaggttgaatatcctttatcaaatgcttgggaccaaaagtgttctagatttcagatattcctggatttaggaatatttgcagattgcatatacataatgagatctcttaaagatgagacccaagtctgaacatgaaattcattttttctttcacgtataccttatacatatagcctagatgtaattttatatatttttaataattttgacatgacgttgtgcacatgtacctagaacttaaagtataataaaaaatatatattaaaaataataataataattttgtgcatgaaaaaacagttttggctgagttttgaccgcaacccatcacatgaggtcagaaaggtgtggaactttccacttgtggaatcacgtcagcactaaaattttttggattttggagcatttcagatttcagatttttgctttagggatgctcaatctctatggaaggtgaagtggtttagagcacaggctctgaagtcagacagacttcagatttagatttcatcctggctcacttaatcgccacatgctcgctggctgtttcttaccctctgaacgatttatacaattctatctaatagcattgttgtataacttaaaatttacatctgagaggtgaaattaacgtatgtaagccgggcgcggtggctcacacctgtaattccagcgctttgagaggctgaggcgggcagatcacctgaggtcaggagttcgagatcagactgaccaatatggtgaaaccctgtctctactaaaaatacaaaattagccaggcatggtggcgcatgcctgtaatcccagctactcgggggactgaggcaggagaactgcttgaacccgggaggcggaggttgcggtgagccgagaacacgccattgcactcaagcccgggcaacaagagcgaaactccatctcaaaaaaaaaaaaaaaaaaagaaagaaagaaattaatgtatgtaaagcacttagcacgaagcctgggacctggtgaacattcaccaagttattactgtagttccctctctaccttccttcatggtggatggctcttacccacacagccacacttcctcaattctgattctatcagcccatctgcaggccttaaatagtcagaacacctgtagagcagatgttaataaggtcccagacagtttctcatctttttttctgtttcacatactgtgcccttaccaaaataagcaggacaccagggattccccatatcaacttagctatctatccatctgcaacttctgtctcaacatcacgagtgcacgtgtgtgtatacatgagactgagtgtatatgtgtgtacaaatacagtttcatactcctctgaacaaaaaaataacaaaggagggtgagggacctcagaggagtcattcataacctcccagagtgatatgcaccagtggagaacactacattggggaaatacagaaacccaatatagcgaatgag[131 bp omitted]tgaaacctcatctctactaaaaatacaaaaattagccgggtatggtggcatacacctgtaatcccagctatatggggggctgaggcacaagaattgctggaagccgggaggtggaggctgcagtgagccaagatcgcaccaccgcacttcagcctaggcgacagagtaagactctgtctcaaaaaaaaaaaaaaaaaaggaaaaagaaaaagaaaagaaaataagaggcaaaagaccaatagagaagtgaaatttccagcctcaaaaaaccttccccgaatctttttgggctaccatcttcattgccctaagcctcacctgaatcaaagcaatgagaggagagactacaatggtgatgcctttggccaacagagcagggagctgatagcatagggattttcctgcccctgtgggcatgcacacaaagacgtccttgttacctgaaaaaatacaagacaacaatatctcagtgcttcctgccttttcattgaagttgttgaaaattaaatgagaatgtaggaaaagcacctagcagagtgtctggcacatgggagggtctcgatgtaatcctaattcccctcctgtcctttctatgaaaaaggcaaggatcctgggaaacttggatacatgcccaaacc[136 bp omitted]tggtgaaactctgtctctactaagaatacaaaaattacccaggcatggtggcacgtgcctgtaatcccagctactcaggaggctgaagcaggagaattgcttgaacccaggaggcggaggttgcagtgagccgagatcgcgccactgcactccagtgtgggcgacagagcaagactctgtttcaaaaaaaaaaaaaaaaaaaaagaagtctgagtctgctgtgatatggatgattgaactaaacagccatgaaagcagagtactgctagatgagtgggtacatctgtgtagacatgagaggacattacttagagggcttttgtttagacatgtatcattaatattacattgctgctcgcctcttggcaacttccatttgtcaccgtatctcaggtttataacattattactctttccttctctatctgggaccaaggccactcaacctgcaacaagggaattacctaggaggccagtgaccgagttaagttattcctaccaccctcactgttgctgttcgtttgtgtgtacaaacgaacaataatgagaatctgaagtgttttcaaagaccatgtgtaaatctagctatgaaatatagaccagctgggtggttctgccactaaaactacaagctttgggccgggcgtggtggctcatgcttgtaatcccagcaccttgggaggccgaggtgggaggattgcctgagcccaggatttggagaccagcctgagcaacatgccaagaccccatctctaattaaaacaaataaacgaaactacaagctttgacaactctaaagatttccaaatccagttatggaccaaaggtgaggcagtacgaagggtgaggaggagggtgttctgccgcagcgttatggtatagccagcataaatttaaaggaaggtagcttggtaatgttaccttttactacagccatggtcgcactctcctgtaaaggcgtcttaaaagagtcaaacccaaagaccttcttcagcgtactccggactcgccgctcagggtcaaaaggaaaggtggtatggtggctgctcatcttagccaagaacagtggccaaaggttaaggcaaaggtagtaaaaggttgccacgagaaccctctgttttgcattaaaaatacagattatttttctgtaacaatttgctatattacacttaaataatgtattatttttaagtaataaagctgaaggtgaactgcctcaagcaatacattcctcagtaattaacatctccacttttacgctcaatgaaaatgaaaacattgaactattccaggccacggtatagcacagagctagaaatcagatcaagagaagaaacataaatgtcttcagaacagcttggagaacggggaaccgttttcctaagatccaccacctgctcctacttctataagcgcaaccacgacgaccgttcttccaccccgggaccccgaaccccttctcccgtcttcctgagcccaagatccgcaattttctctcttggctggccgacacctccctctcttcaccctaagatatcagaaccggccgtggtccgcccaagaattaaaggctgctggctggttccggaactgttcgaagacccctatacacaaccccaactcagagaagccaaagcgctgggaattcagctttaggcagaacccacgcaatcttatatccgtcgcgcagtgatgacgtagcgcgagcgctggcatgagggcggagccaggcgcaggaaactgccgttttgattggtttccagtgtggcgcgggggtctcctgggatccgaaagaacctgcctttccgcccggaagtcggcgtcttgagtcataggagtgagccacgcccgggctgtgggaataagatggcggggaagaagaatgttctgtcgtctctcgcagtttacgcggaagattcagagcccgagtctgatggcgaggctggaatcgaggcggtgggcagcgcggctggtaaggcccaagtgcgaagctggaagggggaatcgggtgtctgcccggaatgctgtaccctcgctgggcgggagggaacaagatggtcattgtgctccaagcaccggaccccgaagaatggtccagggtccggggtgagatagagcattagagactgtggactaagaatgaagaatctccttcccgttatttcgattaatttgcctaaacttactgaaagactccgtgccggctatagtgatagacagagggatggacgaagagggagcggctgctcagccactgcctgtttcccctgggctcgttgtttgatgagggagagcgataagtaaaacatacgtggaagatggtaaagattgtgttcgttaactttataacttttagttaggaatgtgccctaaacacatcttggagcttttaaaaacaaacgtatctgatgcccaaagtgagagaacctaattcggtagaactggggtaggatgtgggcatttgtgaactttttaaggatcccaggtgatttttcttattttgtgagtttttaaagcctaacggtgatgttctcctcctcaggttgagaagcacaatgttagataatggaaacagattcctttgggagaataaagaacaagttacctaacaacatatcaggaccttagcttcctcatctggaaagtgaaggggattggattaggttaggtacttccatgttttgtgattttgtgtggtctcttccagtcagaaagttctctgatggtttcctataaacactttagtgtttatctagtgtttatagcattagaaacagaatttagtactcggttttgttccctgaccttttaatgattttattcagtaaatgctggccttctcagagagccgaatctgggcctattgtaacttaacatgagatttaggttccctttgtatcttcagagatagtcttggccactcaaatctctggacattttttcttacattgtaactcttgttttttttttcttgctttttgtttgtttgtttgttttttaacctttcagaggagaaaggcggattggtatctgatgcctatggggaggatgacttttctcgtctagggggtgatgaagatggttatgaagaagaagaagatgagaacagtagacagtcggtaggtaaatctcccagatccagagctactgaaagcacaatttcatttgtcagattttggaactgtgccaacagtgttccatttcatggttagctccatcccttgctctcccgttttgttttagtattagtggaagaaactggattggatatcagatctgtttgaaaatgtattttcacatggatcattttttattaatctttgaattgaaatttgggggaaaagatagtggattattttatttaacccagatatcaatgggtgttttatgttgatttttccctgtttaaatgatttactccatttatagcaggcattcatcctaactggtgtatcatttatatctacagtcaactctgcattatttttaatcttggttggggctcatttaagtcttctcagtttattaacaagataagaaaggaaaattcgttttcacctgctttttcttttcttttttttttttgagatagggtctcactctgctgtccagattggagtgcagtggtgtgatcatagatagttcactacagtcttgaactcctgggcgcaagtgatcctcccacctcagcctacccagtagctgggactacaggtgggcgccaccatgcctagctaacctattattatttttttttgtcggaatcttgctctgtcgcccatgctggagtgcagtggtgcgatctctgctcactgcaacctccacctcccaggttcaagcaattctcctgccctcagcctcctgagtagctgggattacagacacctgccatcacgcctggctaatttttgtatttttcacagagacggtttcaccatgttggc[131 bp omitted]tgtttcactatgtttcccagtctggtttcaaacttctggcctcaagcaattcccctgcctcaccctcccaaagtgctgggattacaggtatgagccaccatccctggccttcttaacttctttcttgacattttatttggcactttttataatggtgcccttagttcttgatcacaaatcttgcctgaagttcagtaggtgctggagaaaggagaacctgtgctattattaacaagaaagtctttagacacataatcacctgagcaacatgagccagaatttaagtttgcagaaaacgcaaggaaattgaagttggtgcttagcataagacaggcagagttgagtctagatgtcaaatctgactgcttagcaagttttaattaaatcacttaaaatatattatttgtttgaaatttttgttacatgttggtatgtaaatgttagcattaaaattctttccagccaagcacggtggctcatgcctgtaatcccagcactttgggaggctgaggtgggcggatcacaaggtcaggagatcaagaccatcttggccaacatggtgaaaccccatctctactaaaaatacaataattagcagggcatggtggtacgcacctgtagtcccacctactcgggaggctgaggcaggagaatcgcttgaacccgggaggcggaggttgcagtgagccgagatcacgccactgcactccagcctgggcaacagagccagactccatcttaaaaaaaaaaaaaattatttccacaacaaacagaaatgcgttttgtacatgatgcattttgggagatactttcatgcctttagccccatccattaatattgataattcagagttgactgaaattattcagaaaagttttgcaagttgttttctgacttttctgaagtacacacattctggcttaatattcataactcttttctttagtacgtttgcataatgtgtttttgaagtgttatttcatatttgctttgcttagaattttcatcatgtttaagcttcatttcatattttagtaaaatcctctcatcagatcttgttgtagagattctgaaatgtgattgtatttgtctgagctccatctctgtttatttggcatgactgatttcattttaaggagattatggagattgcatttaaagccttggactcactggtaccttacaggacagttaagtctccaaatcatgagtctagtttgttcaagtctctcgagtggtatttatattaatatatggagtgctgtgtaatgtttgggctgaaatgtagctttgttgaaaatagtagtttcaaatgaaaccattttttcctgggtatttagttaaaggcttctgtgcattgggagtgttctgggtagtggaggtgacatggatttagccagctaataaggtagctggtccagcatctgctcctgatctttgaccttcatagcatcagcgttagcgttcagtggaatggcgggctcgctttggagaatgccttaccgtgtgtgatcctttgtgtcaggctgacctcatctggataaggaacaggactgggtagaatggatcactggcagttctgtgagcacttaggtggaggcagagcccactcaactgggactcctgaaaggttgggcattgccctttagtcctgcctttcccaggtcacttgctcaggtagtttgatgcctgccttcctgtgttgatgtttgtgcaaatgccggttgaggtgctgcgatacagctgtgtgtaagccttggcacttggtgttggacactgttagagtaggtccgagtctgatgtacatgtgtatatgaaaaggaaagaaggctcataatcctgatttgaaataactgatacttcagtggaaacacgatgcctgttttattgtgtggcctgatcttactctttcctaaaacatattgcaagctttctccatttttatgtatgtgactttgaactcgggcatcttcattgatgtggactgtctcaccactaaagtaacttgactttgagctgctgatgcttttttgttttttgtttttttcccctccagaatatctctttttccccttatttttctctggttctgagttatatggtaggggagggattcttggtgggatgaccccagctgggtaaatgggctgtttgctccggcccctagttatgcatgtgagactcctcaggcccgctcctttaagcttaatcctctaaattctttgtcttgtaggaagatgacgattcagagactgaaaaacctgaggctgatgacccaaaggtatttggtgttggctgtggtgggtggctggatgcaaacaaggtgtttgaacactgtggctcagttcgtatgtttggtcaagatctgtcccactgacaaactgtgcaactgtgtggacattttctgggataaaataagctttataaagaaagaacctggagacaactcaggaatgaacaaatcctgagacacattggatttccagcctttcagattgtgccatatctcctgactagaaaggcgagaggcctggctgaggccaacaacccacttgcattctgcatcccagatggggctttaagtgtcactgccctgcaggtggattagtctgtttctagacccaggaaggtgtaagggccgcctcgcgtgctttgggttctctttagtcatctagaagtgaacaagaggctataagaaggtcagaccaaaatgaggcctctccccagctctcagggatggtgggtctaatgctcattttcctgggggtgtgtccatccacttttgggcaagctgtacagaatggtctttttcggaacaacataactattctcatagtgtcatcctagtagcagccaagagtaatttgtagcaattcctatcacattccataatgatctgttgtgaaggttaagacacccttgtgttggttaagctgctgtgctgtgcattggccattagaaatgtgtacttgctgaagagtcattttttatgaggaaaaacttcccccctgtacccccaaagaaaaagacttaattatatcactctagacccgggg[219 bp omitted]ggaagctgaggcaggggaattacttgaacctgggaggcagaggttgcagtgagccatgatctgccaatgcactccaacctgggcaacagaatgagaatctgtctcaaaaaaaaaaacaaaaaaaaactgcttggaaaccagctgtaactttcaagatgacctagtaaaatttaggaaatttatgcccaattaaaatctaaaacagtaatattcttgaaaatatagtgtgagctgttccatatttgagctgattctgtgattggatagaactgtatgtagccactaaaatcttgagacgttgtgagtgagaaagataagagtgtgttttaccaggaaagaaagttttggcgccagcatgcaggagggaaaaaaaagaacccctgaaaactgtaaatgcaacctgctttctatgctgagtgaaaaacctggaacccaggcctgagaactcgccctgcctgagaactggcaagatggtatgggcagacccatggccccatagttcaaagtcagtcacagctctcctcgggcttgcagaacaaaacactcagtagtgataatcttctctgcctagtatttagggtatgtgggacttggagcctgcacgtaaaacaagcccagggagccgttaagtgtttgggtttcagttgtggagggaagggaggatctgggtcctagagtctttctgggtacagttgcagccttttcttagggctggaaggcttcctggggaagttggctggagaggagggtacataacacttaacggtcaccccttctaaaatactgtaatccaggcaacaaatccttgggagatgacagggctttgtgagtcagggtgggggtcacatgaaaaacaaaacagactttactgctgtccagtagcagtcactaaagagcggggtgggagggacccaaaaaaggtgaagctgggaagattgtggaaatgccttttgtgctcaggctccccttctcagccctacatcacggctgacagcctcgtcattcctgcctgctccttgactgatgtgcttcgctgttcctcattcactcatgtgcatttcaagttttactgtggaatgaaaagttttcatggaataatttctgttcctcttgaggagccctcagaaatcagaacacaaaatccaaccctcaaagtcacttgatatagttcttttggagggtgatggagaagggtttagataaagcttgccagcttcaatgttctgcaatccccagtggctgccaggcctttaggagtcctcgtggcatctccaaggactacaaatgatccccagcatgagtcttctgtgatactcttatcttagtcctggccctgtcatccttctgcttgagctggcctcagactctcttccacatagcaacatgtacctcaaatccagaactttctggcacatttacattttatttttatttatttattttatttatttttttgagacagagtcttgctctgtcgctcaggctggagtgcagtgctgtgatctcggctcagtgcaacctccgcctcctgggttcaagcgattctcctgtctcagtttcccgagtagctgggattacaggtgtgagccaccatgcccagctaattttttgtatttttaatagagacagggtttcaccatgttggccaggctggtcttgaactcatggcctcaagtgataggcccgcctctgcctcccaaagtgctgggattacaggcataagccactgtgcccagcccacatttttttaaattgatgtgtaacaatattttttatattcaaaacccttaattttggacattctgctttaagcatatgaagtttttttgtttgttttttgttttttttttttttttttttttttttttgaggtggagtctcctctgtcgcctggagtgcagtggtgccatcataacttactgcagccacaacctccctggctcaattaatcctcccacctcagcctcccaaacagctgggactacaggtgtgtgcatcacacctagcaattttttttaatttttttgtagaggaaaggttttgccatattgccccggctggtcttgaactcctgggctcaagtaatctgcccacattggcttcccaaagggctgggattagagctgtgagccaccaggcccagtgcacatgaacataggaagtttctaacaatagaatatgttacaagtgtggatctttgttagaagtgttgtttaacaattagattactgtcataattgtcatctccactaggtggcattctcctttctactttggttttttgttgtttttttgttttgttttgtttttgagtaggagtttcgctcttgttgcccaagctggagtgcaatggcgcaatctcagctcactgcaacctctgcctcccgcattcaagccattctcctgcctc[134 bp omitted]gcctcccaaagtgctgggattacaggtgtgagccacctcgcccggcctctactatggttttttaagatcttttaatttttttcagtagttctcaaaacatttaggtttctttacacaattaaaaattgaggatctcagagttttcattttggttttatctattgatgtttactattttataagttaaaactgagaaaattt[132 bp omitted]taaaaccccatttctataaaaaaaatacaaaaattagccgggtgtggcggcgcatgcctctagtcccagctactcgagaggctgaggtgggagaatcacttgagcctgggaggtagaggttgcagtgagctgtgatcttgtcactgcactccagcctgggtgacagactgaaaccttgtctcaaacaaacaaacctattacatattaacataaataacatttttagaaaaaataagtatttccaaaaaaatgttaatgcaaagagtggcactgtgtcaccactttacaaatctctttaatgtctggcttaatagaatatggctgggtacatataactgcttttgcattcaggtaattataggtattcttctttgatacttcatcaaaactcaacaggtgatagtttccttgaaaggttagttacatcatggaatgcaaagccttaccagtgaactctgcattctgcttccctaaaatccactggtctgtcttgccctttgaatggatcttttacccatacatgatttgatatcgtcaggctctggtgatttgaaaattgctgatgtactgagttacacagatctaaatgttgacacattttgttctgtcgtatcaaaaaagtagtatttattagtgacatcactaatctcatcagaaaatcattaaatgttagaaaccttttagcaagcccacaataaggagcaatacattttttaagataatgtgtttctaataatttttgtttgaaagcatgaatttatcattttcaatatgtgctatcagagctttccttgaagtaacaggctttggtcttgagaaaatgtctgccaaatacccaagtccagataactagtttgtcattatttcaaataaaaatggtgtttcctgaagaaaactgtcagttcaactggtgactcaaataatcacaaacggtagtccatccttttccgtggcttcagtaacctgaggtcagctgcagtctgaatatattacatgcagtaagctattttgagagagagttcacattcgcatagcttttattacagtatataattctaattgttgttaatctcttactagtttataaattaaactttatcataggtatgtatgtataggaaaaagacatagtatgtataggtctcagtactatcagaggttcaaggcatctactgggaatcttggaacgtataccccacggataagggggcattgctatgtgtgcttttccctgagacatttgtctgactttgttatgcagcagaagtatttatgcatgcctctcatgtcattgcccaaaatattaaagagatgtatattcaaatgtcaagatgtcataaaactaatcatttttactgtcctggcagaaaactttttttttttttttttttttgagacactcactctgttgcccaagctggagtgcagtggcacaatctcggctcactgcaacctctgccttccaggttcaagtaattctcctgcctcagcttcctgagtagctgggatacaggcacgcgccaccatggccggctaatttttgtgtttttagtagagacagggtttcaccatattggccaggctggtctcgaactcctgaccttgtgatctgcccgcctcagcctcccaaagtgctgggattacagatgtgagccaccacgcccggcctatggctgaccattcttaagtgaaactggctttttttttttttttttggaaacgaagtctcgctctgtcacccaggctggagtgcagtggcgcaatctcagctcactgcagccttcacctcccagttcaagcgattctcctgcctcagcctcccgagtagctgggattacagatgtgaaccaccgtgcctgactaatttttgtatttttttttttttttttttggtagagttggggtttcaccatgttggtgaggcaggtctcaaattcctgacctcaagtgatccacccacctcagccttccatagtgctgggattacaggcatgggaatcccatgggattacacccagccctttttttttttttttttttttaaatcaaacggctacagtttggtgctgccacctcaatttgttctaaaggctagcagtttacccaccattgcttgtgcaaaggtcaacacgatgaaaaagacaatgacttaaaacggttttgactttgcagaccccttagaaaaactactattattctaaaacagaaatcatgggtcagtgattcagtagttgtttgagaactgtttttattgctctgaaaatgtccgttaagttgttagccttatggggtcttgagccatgttgagggtgggttagtattcagagtaagatgattcagccctggcatggtggggaggagttcaagctctggaatgagactggggttttcttggggaagtcctttaacctcagtttttctcatcgcgaaaataatcatcataataaaatctgtctcatttattttaaggttcaactaagtaaaaataaaatgcagttgtccctcactatctgtggggatcccaggaccccctcctcagatgctcaaggttctgatataaaatggtgtagcatttgcatttagccttgggaatccttctggatactttaaatcatcttatgatacttgatacaatgtaaatggctgtgtaactagttgttagactgtgttgtttagggaataatgacaagcaaaaaagtctgacacgttcaacacagacacaatttaaaacacacacacacacacacacacacacacacaattggaggtgagttctggccatggattcagaaccacagatccagagggccggctgtactcgactcagtatgtctggtgtgtgtttgttcagtagcattggctgaactgaccatcacttccagttccacctgtgcacacttcccaggctggtcataccatgttgtcggccggttttggaagagcagattccatgttttaaactggagtgctctcagaagagcagtcataaaggtgaggggactcaaaagcacatcacctgagggaaaggtagagctggaagacagaagactcgggaagagccggggttgcgctctggtgtttgaaggtctgctgagggaaaggctaaggcagcctgaggcagacctgaagccgcgcgcagaattccacagaagtttaccttcatataacgaaggaccttttgtgatctccggccacaagtgggttgagctgtttcataaggtagtgagctccctgtttctagaggtttttcaggcaagttttttttttttttttttttgagacggagtctcgttctgtcgcccaggctggagtgcagtggctccatctcagctcactgcaagctccgcctcccaggttcacgccattctcctgcctcagcctcccgagtagtacctgggactacaggcgcccgccac[174 bp omitted]atcaacatcataaaatctgttggtagaggttggattaaactccagggagttccctgggaaccccctaggaaaggacttgggcattatacataagcaaagttgagtattctctaactttgttatctgatgactttaaaatatgcacagactggaattgccctggtttttattgctctgatgtttggggttacctgtgagcacagagtcccatgtttgggagcgtgagtaagaactaactctggcccacctgggcagagagacttggtcctgtcctttaggttggggcagcagggattgggctctgcaggtgctgagtttgccccaaactagcgaacaggagattggagaaggaggctgggcgttgcataggaaacaagctttgtttcctgtgttccattattttttcgtctctaacttcaagtttctgatcttgtctcttcggtaagcagcaaattaacaggaggtggcactgctgttctggaaaaagagcagacgtgacagtcctggggccagcacctcactccgggaaaggagtgcctggtggctgaagtgcttcctccccctgtttacctttggcacccgaacatccctttcgccactctcctttgtccatttttacctcgtttgctctggacggtttcccttgtttatttttttctccactcctacagttcctgtggatgaagctgtttccattcactcactgtccctgacacacccttcctttgaaaacaaacatgggggttgagagcctggagcaagaaagatggagcagcctattgccagctgactgggagggactgggatcgccggcctccctgaggtgctgatctaggaaaagatctagatctcacgctctgatctaggaaaagaatcctcccagcccaggagtgtacatctgtgaaaacaaaattccgtcttctgggtcaaggaggtggcatcaggtgggggttggggggaattgttctggcattttttaaaaaggcgtgtataaccccagttaagagaagacatttttaaaattctaagatccctaaagtagtactaaaatgtggagctcacaaacaatttagagccggtctggtggacttgtggtccgaagacctgggttgtgccctggcctggcttccctctggctgtggaaccacaggcctgtaacttaagcttcactcggctccatttgggcagtcagggccgtgagaccccctttgcaaggtggttgtgactgcggcgtgagagaatgtacatgaaggtgcttttcgcagtatacaatgcacttgttagcagtgcttggccttttcagtgtaactaagtctgattatacgcccttatcctgtaggttagaaggcgccacgatttctcggctcactgcccttcatgtctccatagtttttcacagacctctggaacaaaaagaaatgcctaatggctgagtgtggtagctcaagcctgtaatcccagcacttggggatgcccgaggcaggagaattgcttgagcacaggagtttgagaccagcctgggcaacatggtgaaacccgtctctacagaaactacaaaagttagccaggcatggtagtgtgtgcctgtagtcccaggtacttgggaggctgagatgggaggatcatttgatcctgggaggcagaggttgctgtgagccgagatctgtaccactgcactccagcctgggcagcaaaccaagaccctgtctgaaaaaaagaagaaaaaatgcctaacgaatggttctgtttcttatgtcattagcttcagacactaagtattactgtcctcacaattcagtagctgcttaaaaaaataatatgtgtaagtgtgtgtggtatgtgacatgtggagtaaggctgtgtttcctgtaacagttttgttaaatatcctgtggcacctttgtgagtttgctgggttaccccaggtagtagtctgggaactgtggcagtagattgtcttaagagttccagagtgggggccttgacaagtcctcacttagcctcctctggaggcccagccgggtgagtggttctctgcctcagtggctattcatacccatcctgaagaagaccaggtctcccagttgacgggagttactgactcacagtctagatgaggatttgtattgggcagagctgactcggtaattccctcacccactctcctctcaactccttcccactgtccttgcattactcctgatcttttgaagtaccagaatcaaatatctgaaaactgcctaaggggctaatctcccaggaatttgttgttgactgctgattataggaagaactttgaggagcctgccagcaattgcatgcaggcagcactgcaggttgaaatcttatattctttttattgaacacagacccagaacacgggcagcttctgcaggattgctgcagagcacaagtgtttcccatctgggctcctggtatattcgctgcccttccaagactctgggatctgaaaggaagatgctgtggcttttcataaacaagcagcaaagggttgcattcctcctgatattgaaggatatttaggagggtatgtgatgtggtatgagataggagccccgagtccttttgcagcattgcaaacaggttgtttgtgtgcctttgttgatgcgctgctggcgagccctgacaactgagaattactctgcagaacgaaagagcaaacttgagctctcagagcttaagcttggactttttttttaatggacagagttatttttttataaaaatataaaatgtttttatattgtgtttatttttatttttgtcaaattattgtagcaagattgagtattttgcaaaaggaaaaaaaatcacctaatctcatgatgctaaccatacgaccatttttttttttttgagacggagtttcactcttgttgcccaggctggagtgcagtggcgtgatctcagctcactgcagtctccacctccttggttcaagcgattctcctgcctcagcctctcgagtagctgggattacaggtgtgcaccaccacacccggctaattttgtatttttcagtagagatggggtttctccatgttggtcaggctggtcttgaactcctgacctcaggtgatacacctgcctcggcctcccaaagtgctgggattacaagcgtgagctgggattacgggtgcaagccactgcacccggcctcatacagccatttttattcttcttttatgtttgcctataataacatatgttttgcatccagctttgtctctatctatatataaacattttcaatgttgctgtactgtataattataatagcaatatgacacaaatgaacagttaaaaacaaacactgaagaattgtatggcatatgaggctgggcgcagtggctcatgcctgtaatcccagcactttgggaggccaaggcgggcgaatcacgaggtcaggatatcaagaccatcctggccaacatagtgaaacccccatctctactaaaaatacaaaaattagccagacatggtggcacgtgcctgtaatcccagctactcaggaggctgaggcaggagaatcacttgaagcagggagtcggaggttgcggtgagctgagatcacgccactgcactctagcctggtgacacggtgagacttcgtctcaaaaaaaaaaaaaaaaaagaattgtatggtataggagttatatctcaataaagctgctgtaagaaaaatttattttatttatttatttatttattttttttgagacagagtctcactctgtcgcccaggctggagtgcagtggtgcgatctcagctcactgcaacctccctcctggggttcaagcaattcttctgcctcagcctccccaatagctgggactacaggtgcacaccaccacgcctggccaatttttgtattttttttagtagagctgggatttcaccatgttggccaagctggtctcggactcctgacctcaaatgatctgcctgcctcagcctcccaaagtgctgggattacaagcatgaaccatggtgcttggtaaaaaataataataataataataattttttaaatattccaaatggagatttttttaaaaacccattgagatctaccaacttttgttctagtagtgacaccagtccttagccccacagattttcacatcatttccctcattctcatattttcttcagctatataagttaaatccagaaataagcacgttacactagcaaaatctgaataggtttttataattgaatgctatgtctgcagtttccctctaatgaagttctctggtgaacaggaaatgggccatgtgctttacttgggtcagaaggaataactcgttctttaagctcgtgttcttattggaagtccacatggttgttcccccaggaagggagaagagctgggtagagttcaggatttggtagcattttttctgtgagtccccaggaagtctctaggctaaggacagggaggtagcacccacggtttgtgtgattaagcctgcaggaccaaccctttcaaacaagttaactcagatgtgactcactggggccccatggactctagagctgtttcccctgatcgtcataggtgaaagataataattctggctgtcttcccttaagtccagggttttaatacctgcttcactctgacctgctagagaatcattcctggaggggtgcttttccttcttggtcttcactgttggcttacccagtggttgaaccaacagcttcctagaaaccgctaccctttgcagcctcttagtctagagggagaaggtgggaagttgggaataactggataactgggcttttgagccaaacagatttggccttgaatttcaacattgccatttattgggtgagctgcttcattgtgttttacctcagtttactcgtgtgcaaaatggaaataataatgtctacctcatagggttattgtgagacttgaatagtgtaggttagcttgtagtgggttctacgtttagggtgtcatgtggggtgctatgtgagtgggagagtatatgcttcatccttccatcctgttttattagtccacctgcccctgtgttctatctcccataccctgtaatcttttgagtgctgattagaagggaacaaaattacagtatgactcacccaggaccagagaaggaaatggcccttgaccattgctggtttgtgagccatccaccacccttctcttggaagttgtaatgtgggccttgaactattgagaatgcccaagcctacgtagcattcggcacttccctgcgctcaacacgatggatggtcttctttaggcttttcctcaacaacactagggttgccttgcacagctgggagacatggaatttccagaagctcgtggagtggctgtgctgggaagaacctaccccagcctgaggtctagggttctgggggttctaggggcctgctgggtgataaccggatctgagcaggagtcagaaaggcaggcaggccatgaaagtcactcttcaattgtcgcaagggaaggaaatccaagcctgctttggctttgtcctgccaccttccaaggaaggcctcactacatcataagctgaacactgctggtagaagcgctggtagttgttggaagttgtgatctcatgcaaaggggaacaatgaccattattctccctctgacccctccttggctccattgcactgccagaggggccttcttgatggcagttgatccaagtaacctgaagctgagactcccagaagccccacctcactcctgtggttccacagcccacagggagccaccgcgtgtctggtacaccctcccatcagccgtgcaagccccaacatacctccttcccttcgggccagatgccatggattgctaactgaggtgtggctgggcccctccttccccatctgggactcatttctttgaaattatatgatacagaggactgcctgtccttagggatccagcacttccgaccttcgttctgtattttcatccatgtctcctgaaatgctgctgtgtgatttctgggttcaataggattttgctcatttctattcctaactttggagttaggtaaatattttctgggctgtgcttcaaagatgcttgccttctttttggccctctaagtaactcagtccccttcctaccggtgtcgatgatgaccagtttgcatttctgtcaccctgactttcagggactgcgagtatatttgcctgagatgttgatgtaactaactcctcagcttgtcggccagcctctcagatggaatgcttttgtaatttggtagccatgtagagttgtgtgccttccagacttgcattctcaacctcacaaagctgtctcttttgtccttgtctgtctccaggctccccccaaccccccaaatatatcaacctaaagcacagagatactgttcttgtgggaagccttgaagggaaaaagcctgtcctggcctcaccaccaagagcttgactcagatccttggtgtgaggcaaactctggacctagatacacccgttcctgacactctggggataagacaaaaagggaatggccctctctgaccatcttctgtaactttcaagaaaccaaaaatcttgaagtgtcttgaatcaaatgtagattgtacttggaatagtcggataacaaaagtcccccttggaaatagctccctgcatttacattgaagtctagttggttgtaacatgttccatgtaacaacatcaggagccgtgctgagtcacgtgggctttgtaaatttagccagatttttcaaatagagaaactgtttcccttcctcctccctaccttgtcttcagtctacaaggccaattctatagccggcttaataagtcttggcaaactcctgtttcacccattcctatagaaaccttctgtggttggggccgggc[173 bp omitted]gaggaaggagaatggcgtgaaccctggaggcggagcttgcagtgagccgagattgcgccactgcactccagcctgggcaacagagcgggactccatctcaggaaaaagaaaaaaaaaaagaaagaaaaaaagaaaccttctgtggttgggagcagagccttcccatcagcaagtggtctaagcaaaggcaaccccagcgtgtcccagagggccccaccaacttccgcccatttttctgataaattgagtgtttccattcccaggcaggcagtgtgcccacggcagtggctcagtcctggccgacaggatacaactaaaggaaatgtgctagcaatgggctttctccagggctctccagtgggggtggctggcatctggcctctggggtgggatgttcccatgcagcattgggtttggaggctttgctgagctgttgacagctctcactcctagcccccaaccatgtctctgtcaaaccaacatcattttattctggaacttggaggtattttataaaggtaatccagcattgttgctttcttggcaacctgaagtgactcacattgatctcagaaaaccttgttttgactattactttgatgcctccacaagagggtttctggaggatggcatagcagttgttctgaagcagctgtattgcctgatggttaagagcacagtttcatgggactgttgtgaaaaatgagattcttaattgaagagcttagcataatacctaaacttattcccctagattgagttttcatattttatcctcaatgcttggcccattgcttggtgtataaatcatgctcaataaattatctgtggaaaaaataaatgaattaactatacagtaattatttttgtcttaggatttaggagcattaggcccagtgttcggaaagaggatgcagggccagatgtggtggctcacacctgtaatcccagcattttgggaggctgtggcaggaggattgcttgagcctacgagttcaagagcagcctgggcaacatagtgagaccccatctctacaaaaaatttaaaaattagccagccatggtggtgcatgcctgtaatcccagctacttgggaggctgaggcaagagaattgcttgagcccaggaggtcaaggctgcaatgagctatgattgcgccagtgtactccagcctgtgtgacagagtgagaccctgtctcaggaaaaaaaaaaaaaaaaagatgatgcagaaagatgaacaaagaattgggtttgaaatttttttgtaattcagcgttggtgtcccctccccaccttctcctgccccttggcagacttttattgcaagcctagcccttttgttagctgctcttctgctgcctgtccgtctgacatttctagtgaatctacacatgaaactcactgtggagttgaccaggctgggagtctgaagttaaaacataacagctgaaggtaggtgtggaacctaaacttgacagaagacaaactgacagtgtttggggtgtgtgtgtgtgtgtgtgtgtgtgtgtgtgtgtgtgtgagagagacagagagaggtcagtgcttgagcaccttctgtggaccaggctgactattagacttggtgatttttgtgagtacacagagtagagtagtttgtcttcatcggccaggtgagcatgagggtagaggaaggcttccctgggctgggctgaggcctacacggggctttctaggcaggagtggggagaaggtgatttcagggagcaggcattgcaaagatcctgggtgcagaaaggggaggaagaggctgaaatgggcagcagggaatcctcaaggctcgtgggccacagtgaggatctgtttttaaggagctattgtgctcgtgaagtgagatctcatcaggccatgggctgtcccaggtctgagagaataaaggtttgaaaggagtcattttactaatctgcctccctagctgccacgtacttgtaagatgcaagattacattgcccaacaggaaacccccagtctgtagcattcttgcctgtggcctcggggctggctgccctgtgcccctgttcagagtgctttctctgtgcccgctactcccgaagctggaaagaaaacatgacgtttagatttggtgggatctagatgctggcggctgcctttgtggaactcaagtttgacactggagctttgtggggccggttccaggaaggattgaggaagcattgttggctgtaaataaacctccattctcttactcaggacttggtacttctctgctgagtaaatcctcccagctcaaatggcagcttgtccagtttcgtgggtctatattgttgttacttccttcctgcgctccagtcagcttcatcaatggctggacttttgtattctctgcaggaggaaccatattccaggttctgtaattcttgagaaccaggcccctgccactgacctacagttgcatcttccaagtctcagtcacagttggttaagaaaccaaattggcaggttgagatcactattcttctccagggacagcgcccagtgtgccgcagccgcctcctgctctggttgttgggcctttagtctcaggtggggtctgggtggatgaggggtgcaggcagaggaggagacctcggctcagattggtgtcctccaccagctcagcgtttaaaccatacttcctctttcctcctttctgttttctaacttggcttttgtttttgtcttttcgtttttccttgtatcttttttttttttttttggagacaatcttgctctttcaggctggagtgcagtggcgcaatctcggctcactgcaacctccacctctcaagtagctgggattacaggcatgcaccaccatgcccggctaatttttgtatttttagtggagaggaggttttaccatgttgtccaggctggtcccaaactcctggcctcaagtgatctgcgcacctcagcctcccaactcccccagcctgtttttccttgtgtcttgattggaattgaatgagggggctgaagaggtgggcctagtcttttctcccaggagcagccttcctttcctaggtgaggtgctttgttttcaccttccttaggaactgggtgaaaagccctcagcctgttctggctgtgtgttgttgctcatgtctctgggctgcgggttccatgccctctggctgatgtagacagatgcctggtgactagacatccaggatgagctcattactttaaccaactgagaatttctacctgaaggccagtgggtggattcatacgagtcaagacaggtgtttcctgtgcatttcaaaacgctgctggcggggaagagatgaacagtgctttcttgttgctttttgcttgtatcctcacagcccttctttccgcttcctgcctctttaagggcatagtgagaatctcccccagagcaggtggtttaacaccagtgccttgaacgactggcagtttaataatcgagcctttcttccgtctccttaattctgtcatttaaaatatttcagtgggcgagaggtgacttctatcaattaaaagatttcaatgggagggaggtgaggaatgaaaaattacctaccgggtacagtgttcactttctgggtgatgggtacactgggagcccaaaccttacttatcattacacaataatatatccatgtaacagacctgcacatataccaccaaatctaaaataaaatacttttttttaaattataaaataaatcgttcatcacatgttttttctgacacatggctggcttccatgataactgtcatgggtgcttggtccatttttcatactaaatacctcctatctgagacatgactggtaagagggcatctctttaggcctgtcctccctgtggtggaggtcgttatagaggcatatcattactgtttgaatagaggtcacttttattggatgaaacttgattcagtggatggttgtgtgtaaatggtactaaaaagcagctctggggtatttcagggtctccctgtgtcacccaggctggagtgcagtggcatgatcatagctcactgcagctttgacctcccagactcaggtgatctctcctcagcctcccaagtagctaggactacaggctggtctcaaactcctggactcaagcagtcaggcccacctcagcctctcaaagtgctgggattacaggcgtgagccactgcgcctgaccaagcgagcactttaggatccagagaacttaggttgttgtctttcttctttaggagaagctcggcacagtgacagaggcacccagggctcagcaagctcatggcccagcttgttggactcagagggcagaagaatcacattctaaacatgataaggtatagccagcaggaggcagattcccagattgattctccagagccttgtaggtcccaagggtgcctatgacaccaatgggaatctgaaccaacacagacagcacagtcttcttaggagaccctagtgcagcagcgctggcctcctcctgagcgtgcacgcttatatggcttctgagctggccaggctacttcatgcatttggtttaatgggtcctcgtaaggcaggagaatcttcttgaacttggagttgggtctgtggtccattggtcagtactttgttcagaggcactgagggtgggaaggctcatggagctggattctgctgctgggaagctgggtgggccttgtttgtgggcctcaggttcaggactgaatgagagtcctcttgttgcgagttgagggtgtactctgggcatgccatgccctttttttgtactaagagggtagaaaagcaaagaccagactagttggcaaattggaacccaactacccagtttatttatttcttaggcgtagaaggaataatttagggggaactgaagagccaacctaaaggaaaaaaataaaataaagggataaaatacttcctgtgattttgccccatcatctcttttcttccagagacgtgactcaacaacctcagctgagcctggcagcacacacaccccacactcctttccatctccaggttcacaaaagccacaagaagccacggggaggctcctggcctcttactttacctaaggaggccctgaagtggcaagtgtgtttccccttgaagagccattgcatgtttggtgactaacttcctgtggctttggggtagacatggtagactccttgtgtggggattgggcctctgcagttgagtccatgagaaggggtgggtgtggtatggtgcggagccttggggaagggtgagtgggggctggagggagagttaacgaatggtcagtccctgtatgatcagccagctggcgggtgagggaggagctgatgttttcctacaatcagcacccagaaagctgttctctagagggaaaatgtgagggcattttacagtcccatgtattgttactaacactcttgaacactggtttcctgagagtcactgctacaaagggattgttggtcccctgagagactggcagtctctatagggctgctgatttatgactgcggcagtctctatagagccgctgatttatgactgcaacctgaagttggtgtggcagtcctccaggcgcgcctccctgcctgctcccagcctcctctttgcccacctgattggcagggggcagtggctcgaagagatgggttgctaagcagcctggcctggacgtggtgccctgccaggttgaatgaatagctgcagtgttctgaggaatggggaatttggcctgtcccagcatcaggagggactttctggaaagggggctaagactgagtctaggttcagtgtggggaactgggtggccttcctggcaccttccttttggagccgtggcgtggtgtgccatgtctgtgtaagtggagcctgcggagctctgcacctgtcctcgaaaaggtcttgttgcagggtcttcctgtctcatctcctccctcactcatcagcaggaaaagacatggcgtccagcaactttctgtgaactctgcctctgctgttttgatgatgagcacgtgtggcccttgagattgttgatctaactggctttgaggggctgggtgtcagcaacccagaaatgggggaaacaggtgtgttcttgccattttacacttgagacaatggaggcaagggaagacttgtgacggagggcttggaccgtggctttctcagcattgattttggtttagatgaaacatttactacagaacagtgaaatccagaaaacgtctaagaagcctttgctctcaggtttctgcaggacatgtggatgtagctgtcatgggacactgtttgcattagggattggaggaagcttttctttggagggagtataaagccagtgtaaagggagctgagagccagagagaggcttccttgagcctggggcctctctgggatccccattctgccacttattaaaggtttgctgcatgcttgctctgaggttccatgagctgcccctttatcctcatgatgaagcctcccttctttgaactaaaaataagaagagtatcttgggagcagctagtctgcattttcatctcgggagtctgctgttacaaagcagtcacctcttgcttccttggtaccagcggtagaggtggtgatgtctgggctggccgggcccttgagctctgcactccattcaggcaagcttcctcagacccaggggagagcaacaggcagggtatacgttgcccagttggctgcagcaggcttgctggcttgtgttctcctcagcgatggtgggtttggtcactgaaaaggcatggaggagagaccggcgtggggctcgggagcatccggctgctgcgatgcgggaagaagagggttcggaggctcgggggtgccagaggcccctgaagcatcagcttacccttagtgttcctggcagtgcttttactttttctccttccttaaaaatcctgagtggtctcagtagagagtagctggttcaggagccccagtcttacctcctcgtatttgtttgtcttttgcaggataatacagaagcagaaaagcgagacccccaggaactcgtgggtgagtattgggggatcctgggggcacgtttctcagccttgctcctagcagcctggcttccagccatgccaggcctgccgccccacagggcttctgtctgctgtgagcactgttgtccctttggctccctctcagggctttggcatttcctaggatgcccgggtgagacgtccagggaacagttcttctttggaaatcatatttgtggtgtgttttaatgggctttggtcggttgccagcgctgtcaagagggaattcagggcactcagctgggagcgtgtcttggtctctgcttcccctagtgccctgggcttgtcctctgtctttgcaacccctcctccccctctccgctggcatatgcatgctgctcagggagtcagcatgtggcctctgctggcactttgctctgtccccaggcaggaacatgcctcacagccctggagtctggggctctttgtgatttgggaggagcagggacactatgtttctggaaaacagcatacatcatccaagtcctgtgctagccccagccttttaatccttttagaaagccccccagctcctttcacgtggctcccaaagcccgaccggggggcagttcccggcatctgagtcagagctcttggtggggttggccctccctctctgtggcaaccattaccagctctcctgtccgtcctgctgatcttcacaaacaggctcctgcctcctgcggtcttgcctcggtggctcactgactccagccctgggggttctgagcccagggaccacctggaagcgctgccccagtagtcagtccttcccacccaggcttcctcccagtagggcctttctgctgggagttctgctacaaagcctgttctccttttccagaactaaaggagctaggaatcgttcattctatttgtcttttgaagaaggattgggtgggaacacggtaacgctgagcagcccagaccctcagcaggagggccttaatccctggcctctctgatggagtttcagtctttcaaatcctataaaaaccaagattttcctaaaacctagagtttcttctttagaaagtgacgccttaggggtgcaacatttggctttgagggcagaggaagcagagtgtgcatctgctgggaagccgatggccggcccaagggggcgatccacgggtcgggcgtggacgggagccttggcctcttatccccgccatcacccgagccgaccctgctgtttactgtgagaaactacacggctggggatcagagagcagcctgtcacgtgccaacgcagagatgcccttgctcttgctagtagtgctgggcaggcagtggaatgtgtgtgggcatcagccatctcagcccccagttgcttccagagccaacttgtcactttttctccctgtgccactttttggaaatagctttattgaggtataatttacatagagtaagacttgccaattttacgtgtgccattttatgaattttgacaaatgtgtatagttgtgttagccccaccacaattgtgatacagaacgcacccatcactccgaaatgttcccttgtgccccgaccgtgttacaggtgattccctccctcagcctcaggcaagctgtgatctacactctcctcactatagctttgcctttctttagaatttcctataaatcaggatctccccaccctggccctactgacacttagggctggatgagtctttgttgtggggctgtcctgtgctttgcagggtgtttagcagtgtccttggtctctacccactacgtgccagaggcactctcccttccccagatgtgacagtgatcaatgtctccagacattgccaaatgtccccttggggcagaatcacccctagttaagaaccagggatagaaagggaactagtgtttttgtctggcttctttcactcagcacggtgcttgcaagactcatccatgtagttgggcatgtccagagtttctttttgtagccaagtaatatttcactgtagggatacaccacagtttgtttactgattcacccatgaggacacaaatggatctttaagcggcatcgttttgattactcaccattcctcattgacgagtagctagtttagttcctcttactgaagacgtaattagttgaaggacagtggcttccattcatgatgcagtgcctgtcagcccctctacctaagcttttgtccactctggtgtcaggactcaggttgcttaccaggtatgggaagtgtgtccatgcatgtagacagccccagcttttagagaacaagcaggagagcagagaagccaaaccacaggcatctgcagcactgcagccccttgacagagccgagcatgcacaccctgtctgtgccctccagggcctcgcagatgcccacggctgagcctggagcagtggtgctggtgtggcagtgcacgtgggttctctctgtcactcaggagctggagatactccaccgtcccctggggccccccagctcgctcactccctgccatcccataagcccgtccaactagctgttcctgcacagatccctccctggcagctgtgggtactctgggtgttttctgacttgggcacgcaccagggcaagtcacgctgacagctggcttctcaagtcctaagtgcggctgcctctgagaacacacccatcagacccaggcagcagccacagacccagcgctgcttccaagagactgtggacacatcgctttactggcttgaggctctgtctgcttacaagaaatgtggggctcagctggtcgcagtggctcatgcctgtcatcccagcacttggggaggctgaggcgggcagatcacgaggttgggagttcaaaagcagcctggccagcgtggtgaaaccccatttctactaaaaatccaaaaaaaaaaaaaaaattagccaggcatggtggtacttgcctatagtccaagctacccgggaggctgaggcaagagaactgcttgaacctggcaggtggaggttgcagtgagccgagataacaccattgcactccagtctgggcgacatagcgagactccatctcaattaaaaaaaaaaaaaagaaaagaaacagaaatgtggggttcaagtcttccacattagattcattccaggactcagaagggagaggaccactgaaagattgcttccaaactctgtgttgtacacttctatctagttttcccgaatgtgttcctttatttgccagttacttcctaggaattatcttgtttcaagccctggactgaggaggggctcccctcctctttttttttttttttttttggagacggggtctggctttgtcacccaggctggaggggctggagtgcagtggtgcaatctcggctcactgtaagctccgcctcctgggttcacaccattctcctgcctcagcctcccgagtagctgggactacaggcgcccaccaccacacttggctaaatttttgtatttttagtagggatggg[135 bp omitted]cccagagtgtggctgggttgctgtggcaacagggtcacaccctgtttttccaaaggctttcctggcaaatgccaaagggcactctttgtctctctgtcacaagcacagataggttctctccagcccagggaagaagttaaccctgcttgtttatgtgcctagcgcctgccaaggccctccttgcttttgttgttgctgcttgtgagataggaccagctccccccagctgattccactctccaccagcttctgcaacctcagccttggcactttcacctattccagggctgggaagaaggaggaagttagaggagacttgaattccagccatatctgggtttcacctttgcttgaggagtcaggagaccaaaggaaggtgctgggcaaagagaagcacctcgtctcctgctcttgggctgcactggcatctggggcccacagcaggacctctgatcaatgtatcacccagtctctgtcctcttgccgtcacctaaaatggcagattagtgctctgttcttggggcgcttccagtgagaatccactgacaacagtgaaaatcaacacatgaagtcatgtttttaggatggccccaggctcgactcctgtctcagtgtatttgcagtcggcataggcttatcctgcagcagctggactggcagagtctgggagccttgtccccagccctccttggcactgtgttctttacagtaactgaaactccaggcagagatcaaagcaccttgtctactaagcaaacattaacccagcatggggagaggagaaggggctggctgtgcgaagccagccgggcagctcagcagtgggttagctggggcctgcacacagtaggtgctcagtaagtgcttgctgagtgttactggtgttttgttcattctttctcttcatcctgccccaccctgccctggctgctctttgctcattgtatgatccttttcatgagagagtgttttgaagagcgcagacagaatcttaacaaatagcgcattgtcccagcgatccaaagcaggactgcagtgccggggtggcccaaggctgcggggaagaggctggagagagcaaggcctgccggacagtggcagatctctaaggaaattgtcccctgggggttgtggttcttcccatcagaatcaggccttttgttctcaggaatgaggtgggctaagagagagttgattggtttatttttaaaagatcctcagctgataatggtaaaaagtatcatttatacacaaggccattttgtttactttgggacccaaaacttagggaaccctgaattctgtttctcctgtagcctaggcaggtcagccttagacgagacgggtggccccaagcacctctgagtttccaaaatcttgcaagtattttagagacatatgcagtggtggctggagctggtttacagacatatgcagtggtggctggagctggtttacagacatatgcagtggtggctggagctggtttacagacatatgcagtggtggctggagctggtttacagacatatgcagtggtggctggagctggtttacagacatatgcagtggtggctggagctggctcatgttgtgagcctattgtgtacatctcttcccagccttgagttcagtgacttcaccttggtagcttgaaattggccatggcaggagaatttacaccacaagaaatggcaaatgccacagatcatggcgcctccctgcttccccatccccacgcccagctggtcattaaacatttaccagcacactgctgactctttccttaaaagttaaccattgtgggccaggcacagtggctcatacccataatcccagcactttaggaggctgaggctggaggatggcttgatccaacagttcaagaccagcctgggcaacataacgagaccccatctttacaaaaacttttaagattagtcaggcatggtggcatgcacctgtagtcctagctactcaggaggctgagacaggagttcgaggttgcagtgagatatgattgtaccactacgctctagcctgggttacagagtaaaacccccatctctttgttttatttttttatttcattttatgtattttattttcctttttgagacaagagtcttactttgtcacccaggctggagtatagtggcgtgatcttggctcactgcagccaccaccttcgggttcaagcaattctagttcctcaatagctgggtttacaggcatgcatcaccatgccagttgcttttgtatttttagtagagacggggtttcgccatgttggccaagctggtctagaactcctgacctcaaatgatctgcctaccttggcttcccaaaatgttgggagtataggcgtgagccaccgcacccagctgaccccgtctctttaaaaaaaaaaaaaaaaacggaaaagttaactgctgtatacatttattccctctgcctgaacttttcttctcccaagctggcacatggcccaccccttccggtcattcagtctcagctcagatgacacctcagagaggccacatccgaacactcagttgtactgttttcatagtgtttatccctacctgataacattttatgtgcttatgtttttttgtccatgtctgtcccttgttctaatccccacctacagaatttttccttcttctctcaacagcctccttttctgaaagagttcggaacatgtcgcctgatgaaatcaagatcccgccagaaccccctggcagatgttcaaatcacttgcaagtaagcatgagactcggctactgaggtcggatagattagatagcctgggttacgtgtttggtttggtcttaatcttaagagaccatggcagggaaagggactgaggcttctataaaagaaactgacaggtgggaaggatcccacagtccactttacctcctgttagcctcatctcaggagttggctcctacacccaccgccatgtcccgtggtgctgctccagcagggcggccctgtcttgccttcagtgaagtcctaagcagagacagagaaaagaacgtaaccttttctgtgcagccctactgggccagtggtagcttctcagaaagagctttgctaagaaactgaggaaccctcagaatgtaaaataaattacagaaatgaaaaagtcacaggcattatatgtatacattttctatcctaatctatttctaaaatgctgattcagtagcttcttccctgacagaatgtgcagccctgactggaggttttgaaatcccaaggagtcgaggcttttgtgcagttacactccctggggggacagctagggttcagcccgtggctctccttgtccctctgtgggttcccttgtgatgaacaatagaacaggcacccaaggctgcacaatcatggctcctggaccacctgcttcacctttgatcctggagctcccactgggtgcctctggctacacagcaagcccgtgacaccgccctaacggatggatgactaatgggacctgaggctaaggaatgcagcaagctaggggagggccagagcaggactgggggtgcagcacagattcccttcccttcccggaagtctcctcccattgctgggtcgtctccccaccaccgccctccagaatcacgtcaccctccgtgccagacaaccagacaacaagctccagcctgtaaggacgactccagcaacccgccaggcagagacaaacggcgcacagcatacagtgccaattgtgcctcctctttagaccctcctgatggtggaaaccatgacattcgagcaaacattttagttcatcttgagtagtagaactgatcttatggcccaggagacacagccaagtcatctgtatgacatgggttctcctcaagttgccaagccttctgtatatggctccctccatgaccctggaggagacagcttggaggacagaggttcttcagtctcggctgaagtcacagacctctctctgcagttcagctctgctctggccagtcttggtagaaagatttggcctctaacaaggggagtggatcacccctcctgacgtgtcctaaatgttgtcatgtgggccctccaggcctgcccacctgcttttgccggcacagtgcctcagatgtttcccttctggagaatctatatttaacccccactgcagggggaggctgcaggtagatcttgccctgggccagtgcccgccttccttgctaagactgctctttctagaggtggctctgccatgacactctggtgtcttggccctcttcattggcactgggtcatgctgatgccgtctactttgggcatcatgtccatgggctgggcaggacccccttcctgaggacgcctgtggcactggccacagtaggtaagcctggatcccccgaggtggttctccactctcccatcgaaagccagggcagtgacctgtgggggagtttgggtgagagataagcagttaacccttgatgccctcgataaaccagcgcggaccagccacctgtgagcctccccataaaagacacattctaaaaagtttgcaagaccgaatccaaaaaactctattcccgcctcccgttaaaaggacatagcccttccgaagtctcctgtggctcacagttctgctgaggacttgatctcatgttaaaattgaaaaccaggatttagtccctgcgtatcaacaccaacccctaaaccctacttcggatgattctggaactgattaaccagttggggctttgttcattattttctctatggctcctctgctgtgtgatcttttcactgctcactatactgtcatccagagagcgtcaggaaacctcagcagtgaaagcagcctggtctcggtttatcttacttgtgtgcagttctgggcaaaggcagggtggagaaagagaatagattaattttttgttttgttttgtcgagacagtctcactgcatcaccaggctggagtgcagtggcatgatctcagctcactgcaacctccacctcccaggttcaagctattcttctgccttagcttcccaagtagctgggactacaggcttgccccaccacacccagctaattttgtttgtatttttagtagagatggggtttcaacatgtgggccaggatggtctcaatctctggacctcgtgatccacccgcctcagcctcccaaagttctgggattacaggcgtgagccaccgtgcctggctgaggataggttaaattttaacatgaggtcaagttgggctttgcctgactggagcctcatgttcatgctgcacatgtagctggtgaccaggggctgggacggtggaggggtgggcttctgtcatacacccccccaccccctctgctcctcttcacaggacaagatccagaagctttatgaacgaaagataaaggagggaatggatatgaactacattatccaaaggaagaaagaatttcggaaccctaggtaagtttcccttgagcctgcagagtttattgagttattaatgttggactaaggactaagacgtccccaaggaggtggtgaggaaaagcccagagcccaaaccatcacccagacttgtcattacactgagtgcctgctggacatggcggactgtgctaacccagccagaggcttgccatttaagatccagaaaaaacacaaagcaattcataccgagacctagacggggatgagggagacctggctgagttctcgtccctgctctgagcctaaagcacatgacctctcaagtcccctgtcctcatggaaggaattggactagacaattactgtaggttcatcttccaactctaaaaagctgatttttgcatataggtgagaggtcttaggaccagagcgatgtctggtcttcctccattgaatgttcaagctagtgacatacagggaaaagagcatggcccttgtgtgggtctgagtgtggtaagcccaatccagctgtgcagactgaaggtcagtgagacaaaactcagccgtcaccttgaccctgtgctcctcccggcccctagctaacaggtccatctccctgggagagtggagggccatcaggaagcttgcttagagcagctgagctggatttaaaagttgtgaaggttttgtgtcagccccaggagctggatggttcaggtcccatgcagggacgtggacttgtgcctgctcagcgccggcactgttctttcagcatctacgagaagctgatccagttctgtgccattgacgagcttggcaccaactacccaaaggtgcgtctggcacacggggctggagggtgatggggacacccagggtcctttgcttgttccatgggatttgacctgcagccacagaaaggtccacgtggtggcacggctcgttgaaagcacagtccctgtctcttttgtttgagtccctattgttctgaaatagtccaataaagagattccggtggccggcctggtgcctggcccctgactggtggggacatgtgtggacctgctgctcctggggttcgctggatgggggcttcgtgctcccatgttcttcagcacttgccagccgccccttggctaaagaccaaagatgacagccgagccccgggtaaggggaccccagaccaagaagctctatgggaagacttgggccaggaacttgggtttctgagtcatttgtcatctgagtcattcgccttttcctttgcaggatatgtttgatccccatggctggtctgaggactcctactatgaggcattaggtagcctttcgtccctcctcccatataccttgtccgcccacccgactgtccctttatccagtcagttggttatccaggtgacacatatttcagggtctactctatgtcaggccatgttcaagggggctgggtacaggcctgaatgagacagacccacccctgccttaagaggcttatgccacagcaaagaagatggaacgtcacgccagtaacgccagcatcgatgagtgttggtgatgacggagttgctgggtacaggggagctttggcaagcagggtcatctaatctggccaaagggatgggaaggcctcactgacaaaactgtgttcaagctgaggtttgaagaggcagaggggccaggcaggtgtaggcagaatgttctgaggccagtgagaggatggctttttcttaagataccagtttgggagcactgggagaaatgtcaaagggcccaaacccctagaccataggtcttaagcctgcagcccatggcccagatcttggcctgtagaggtgctttgtttggccttcatgaattttgtcatcttttaatttgaattcattgccaacattttatataatctctgattccagcttctctccatcagtaggagggtagtccccattgggcctgtattcccgtgtgtggcagtccacaggagctcaggagtagctgacccttccgggcacacacagggcatgcagcccgccagtctggagctgaaggcccctgccctatgccgaccaagggctggcttcattttgccaagcacaaagaacactgagcccatgaaggcctttagcccgctgaaaagaacgcagggatcagagtaggctccctcagcccagagctgctcgggggccacctttgtaacagcttctcttgtcttcatagccaaggcccagaaaattgagatggacaaattggaaaaggccaaaaaggagcgaacaaaagtaagtgatggcagacctcctagatgaaaaaggcacatgtggagtgcatgggtcctgctggctgagcccagaaggtgtccaggctgcccccaaccctggccccgtgtcatcacccggcgatgctctgagcctctcagcagggcctgtgtgctgagcagacctgctgggttcacggcgctcgtctgctgcttttgccctcggagacttgtttgctacattgtgcccccctttcctccccgccaattgcagagccttggggggctttgtccgttttgggtcatgggggccctttgtagcctgaagggagggaaatagttccctaagagagtgccaggcccagcttgcgctgctcggtgagtgtcttggcctccagagctgccctcagtggctcgcctgggtgctacctattaggtcccacgttagggccctgagcaccacttgttccctggcagtgtggtctgggttcttcagggagcatcagtttggctgggagaccaaactgttatctctgggccttgttccctttgtgaccagtctcagagccgggcatcaggacaccagctcctcccacttctggctcggcctgaccatcctcaagcagctgcggcctccagaccgcttccctcaccccaagcagaggggctgtggggcctgggcatgctggtggccctctggaggtgctggctgctgggccaggaacgtgggagctggtgcaaggggatagttggggtttctcattcttaacccttgattgaatctcccttctctctctttccctctcccttccaaaccccaggcttgttgcagggacgtgtctgcagcgcctggggaccggagctgtccttcccctgtgcgggcgggcaccgcctcctcctgggtgtgaggaggaggggcctggccaaacggttctgggcatgtgaggtggggcggtgggcggggggtgccgggcatgtgcagagacctggtgatgccgggagggatacagtactgtttggaaagttcttttaagagtgaaaagcccctttgggttcttcttagacatctcgccctaccccagatgggcagagcagagttcatttccaatgcctcttttgtgtagtgccaagctcctgtcccccaggagctgacggatggcaaaaagctgtggacacccagctttgcctggtcttattctcttccctctccctctccagattgagtttgtgacgggcaccaaaaaaggcaccacgaccaacgccacgtccaccaccactaccactgccagcacagctgttgcaggtagattgcagagctgccctgcctcctgccacacacatggagccagggtctccctggcttgtttgggcgacagacagcacgtggatctgggcctgggctcagccttgctactttgagaagcacctttggagtctggggtgggccacttcggggtctgctccctagactcccgctggcctgcagggggaagggaaagagggcaccgctcattggtggatcgtgatcctgatttctgctttatctccagatgctcagaagagaaagagcaagtgggattcggctatcccagtgacaacgatagcccagcccaccatcctcaccaccacagccaccctgccagctgttgtcacggtcaccaccagcgccagcggctccaagaccaccgtcatctctgctgtgggcaccattgtgaagaaggccaagcagtgacctgaggggccaccctaggacttgaaaggaccgtgcagcccagtgaccactgcccagtgggaggcgccactttgtatatttcaggactgggacctactccccagatgccacctgagaggagcttctgtttggcattccagatggaaggacaggcagcacgggagccaggcgctgtggacagggtctgtccacgcaccacctggggtctgccgcctattaaaagtgccgtattcttacctcttggcatctcagatgcactggcctctcctgcattctgtttgcaggcaaatgcttcagctcacatgtcccccaagactcaatagtcttggttgggactattgcctcagggttgacaacagggtgatggaggcctgggacgctgttcagaggggtgacccaagaagtcaccgttgttatccgtgtatgcctctgggcatggacaggcgggagtccccgagccccacgtatgccccatctgccgccttgatcccaaaacccagccagttctcgggtgatggtggagctgtgctcccttgagtgcacttgagcactccccagaccagatcactttttggacacacccaggaaggcttttgaagtcaagccagtttccagaagggctggggtgagatcctgacctgtgcagagagtggggaggcgtcagcgcctggccagggctgccccagtcctttggtgcccggtgagcgcagccagcaggagctgagcagcgggggagatgaatcacctcctgccttggcgaggcggcagctcattgtttacaggcaagccctgctcctgggagggctcctgccaccccacccttcctctgtgtgttatctctgccccacagcagcccctgggcagcaccagtggccactgggctccccccggggttgaaacgggtttcccagaccaggggttcagaggagactatttacccttcatgatctttggcgattctccactggagcggaagggctgtgtgtcaaaagaaggaagccaggctgtgaagggccgtgttgctttcagtgggtgggcagaggtttagaaaggtggttctgaaatggcacctggtactcttgtgggacctggggaatataaggaactctgtgcatgaggtttcaaaaataaaaattgagtccactctccccgtacacacacactcgggcacttcaggaggtcagttctcaccccttcctcgatggggctttaaagctctggggagaagagctgctccccactcatgccccagagggactgtgaaaaggcttcctgtgacctccgatggcggcccctcattggccaagggcactgtggatgttttgtgggaggcagcatggcaccgtggaaagggcagtagacgtggagccggcacctctggtctggattccacttaaaaccagttgagtggtctcaagcccttaacctctgtaagcctgtttcttctctgaaatcacagtaataaagcgtcgtaagatggttgggaagaaccagaggtgacttatgcaaaagctttataaactgtaaagttcctgccagtgttttttgttggctaaatccaatttttttttgttgtagaccaaggagagaagcaaactcctggcctgtcccccgtctcgtgctctgtcggcggggtagggtttggcaggtctttcccctccccgctttcctctgggcagccctggcgctgccattcatctgtccagttaaagcagtaatgactgtctcctgcggggccgcagaggtagggggcctggagaatgaacataggcttagaagttgggcaaccccaggccaaaactgctgccccacttaccagcctcgtgagttgggtcaaggtttttaatccttctagactttcatttactcttctataaaatggtgcttgcccaccttagtcacatcaaggatggcccagaggtgtgtgaacagttcctgttgtgggtggatggcccaggcactaggggccaaagttgtttctaaccagtgtgtgtctgctcgccagagaacagtgtccaaactgaactctgtccacggctcctactgtcccccacccacacacctgctacctctcccgagggctctgatcttgggtgggcatcaggattcatttagcttcccaccttgcacatgtagtaccccaagatgtgtctcaggtttgtataatcccctcctgactctgctggacaggtaggtgctcctttctcaacactcacagcacccccttgcttttaggatcacactgaactgccgtgtaatctctgcccacaagcgggatgagacagctcatgtctcctagttcttgtaagcagaaacaaagcaggcataaataacactctgctccagtgcctggcatgagataagtacacaggtggttgggggaatggagggatgaaaggagaggtgagtttgctcatcttccaaaggggtggtctctgctcctagggtcactgaaatgaaagtttccagcccccaagccctgtgctcacagcatcactcaagcctcctagggctcgatttccaaagggctgctgtcgattggtgatgcattgacaattattgaggttcagtgataggtacaggagtgttcaatattctctttaattttgtatctatt[353 bp omitted]aggtgcctgtaatcctagctacttgggaggctgaggcaggagaatcgcttgaacccaggaggcgaaggttgcagtgagcctagattgcgccattgcactccagcctgagcgacaagagcaaaactccctctcaggggcggagggggttggaaggctattaagccacacaaaaaagaacaaggggccgggcgcagtgattcacgtctgtaatcccagcactttgggaggccaagggactggatcccatgaggccaggagttcgagaccagcctgaccaacatagtgaaccctcatctctactaaaaaaaaaaaaaaaatagctggtcgtggtggcgcatgcctgtagtcccagctagttgggagactgaggcaggagaatagcttgaacccgggaggcagaggttgcagtgagctgagattgtgccaatgctcttcagcctgggcaacaagagcaaaaactccgtctcaaaaaaaaaaaaaaagggagccgggcgcggtggctcatgccttttaataccaggactttgggaggccaaggcgggcagatcacaaggacaggaattcaagaccagcctggccaacatggtgaaaccccatgtctactaaaaatacaaaaactagcctggtgtgatggcaggtgcttataatcccagctactcaggaggctgaggcaggagaattgcttgaagccgggcagcagagattgcagtgagccgagattgcgccactgcactccagcctgggcaatacagtgagactctgtctcaaaaaaaaaaaaactgaaaaaaagatcttcatggatagattatttggagtgatctttaggagagattaaatgaaaaaaggtatcaaacagtacatgtaataaattatcttgtataagaagggagaaaatactatacaaataaaaaataattggctgggcgtggtggctcatgtctgtaatcccaacactttgggaggaggcaggcagatcacttgaggccaggagttcgagaccagcctggccaacgtggtgaaaccccatctctactaaaaatacaaaaatcagccgataatggtggtgggcacctgtagtcccagctagttgggaggttgaggcaagagaatcacttgaacccgggaggcagaggttgcagtgagccaagatcgtgccactgcactgcaccctgggcaacagggcgagactcttatcttaaataataataataattgccaggcgtgggggcatgcacctgtagttccagctgctcaggtggctgagatgggaggatcccttgagcccaggagttggaggctgctgtgagccaagatttcaccactgcattccagcctgaaccacagcaagactccatctctaaaaaataataatagaagaaggagctacaaaaataaaaccaaataaattaagaaaaatctctaatattaaatttgaatgatttgaatgaagatatcaatatgaactcaggatttaagaaaaagatacatttcctatctgtccattgcaaggagctaggacctcctgctttgtatatggtgagttaaaaaaaaaacaaaacctggaagcaatgacagacaccctggtagcatccagcacacagtattcacatcgtggtctctaataccattccccactgaaaggaaccaagccggggccccttggagaaacagcagatcctgaaatctaagtaggactggggcagttctagaaagcagggaagacacggaagtcagatcaaaatgtcaaaaaagctagggtgaagggatctcctactggccaaatttggttacatttgaacatgaaggaagaatgattacaatgaattgtgtgttttttgtttttttttttttttgagacagcgtctcactctgttgcccaggctggagtgcagtggcacggtctcggttcactgcaacttctgcctcctgggttcaagcggttctcctgcctcagcctcccgagtagctgggattacagatgcccaccaccacgcccagctaatttttgtatttttagtagagacggggtgtcaccatgttggcc[131 bp omitted]tcattcacagtgataatttgaaaaaaaaatgtatttgccaccattagacttgaatatatctactccttactctgaaattgataattaggtgagaagaattaaccattgtgcaccattgatgggattttgaagtgcaactgctgtggaaacagtatggcagttcttcaaaagtttcttttttttttttaagacagtctcactcttgcccaggctggagtgcaggggtgccatcttggttcactgcaacctactcctaggctcaagcaatcctcctgcctcagcccccaaagtatccgggactataggcatgagccaccatgctcggctaatttttggttggttggtttgttttttgagacagtctcactctgtcacccaggctggcatgcagtggtgcgatcttggctcactgcaacctctgtctcctgggttcaagcaattctcctgcttcagcctcccaagtagctgggactacggcacgtggcgccatacccaactaactgttgtctttttggtagagacagggtttcactatgttggccagagtggtctcgaactcctgacctcaggtgatccacctccctcagcctcccaaagtgctgggattataggtatgagccaccatgcccagccagtccttcaaaagttaaaaatagaactatcatatgacccagtggtcccacttctggatatatatccaaaataattgaaggcagggtctcaaagagatagttacacacccatgttcatagcagcatcattcacagtagccaagaggtggaagtgcccaaatgtccattgacagatgagtgaataaacaaataatgatatatacatacaatatacatacacgcatacttaaatattcagccttaaaaaggaaggaaatcctgtcacattcaacacatgaatgaacctcaaggacgttatgctaagtgcaataagccagtcacaataagaaatactgaataattccatttatatgagacatccagtgtagacaaattcataacagacaggaagtagaatggtggttgctaggaactgggcatgcagaagggtgaaatggagagttgcttaatgggtacaggattttagttttgccacatgaaaagttctggtgatctgttacacaacaatagatatattgaactgtacacttaaaaaatggtaaagatggtgaactttaacgtgttttcaggatctttttatattttattttatttatttatttattttaagacggagtctcgctctgtcgcctgggctggagtacagtggcgcgatctccgctcactgcaagctcagccttctgggttcacgccattctcctgcctcagcctcccgagtaactgggacttcaggcacctgccaccactcctagctaatttttttttgtgttttttgtagagacggggtttcaccgtgttagccaggatgatctccatctcctgatctcgtgatccacctgtctcggccccccaaagtgctgggattataggcatgagccaccatacccggcccatcttttttaaaaaaaaatattttgggttgctgtgtaatagtaattttttaaagtttctataactcaaaactttatttaaaaaagcatttaccctgcatttttaggggaacatagttcattcccagttgattaaaggaagctctattttttttttaatcagaaagacacttattaaatgtagaaaggagctgggcacaatggctcacacctgtaatcccagcactttgggaggctgagatgggaagatcacctgagatcaggagctcaagaccagcctggccaaatgtcgaaacaccgactctactaaaaaaaaaaaaaaaatttagccaggtgtggtggcatgcacctgtactcccaggtactcggggggctgaggcaggagaatcacttgaacccaagaggtggagtttgcaatgagctgagatcacgccactgcactccagcctgggcaacagagcgagactctgtctcaaaaaaaaataaaaataaaaaataaaaaatttaaaatttaaaaaatagggctgggcacagtggctcacgcctgtaatcccagcattttgggaggccaaggtgggcagatcacgagatcaggagatcgagaccgtcctggttagtacgatgaaaccccgtctctactaaaatacaaaaaattagccgggcgtggcggcacgtgcctgtagtcccagttactcgggaggctgaagcaggagaatggcatgaacccgggaggcggagcttgcaatgagctgagattgtgccactgcactccagcctgggcgacagaacaagactccatctcaaataaataaataaataaataaataaatatttaaaaaattaaaatgtagaaaggaaggtagaaacagaaaattgcaatttttcagccccaaaaatgatacaggtgcccttagacttataatagggttatgtccagataaacccattgtaggtcaaaaatgtaagtggaagatgcatttaataccctgataaatccatagtaaagtaaaaaaaatcttaagtcaaatcattgtaagtccaaatgctcaacttatgataatgttacatcccaataaaccccatcttaaagttaaaaaattctaaatcaaaccatctaggttggggacagtctaattgattcaagccagggtcaccaatgagtgctaaaacgattcagtgaaagcttgttgggaaacggacagggagacaaagcatcatcctcctcccctagataacctccttttttttctttttattgtttaattaatttttttttgagacagagccttgctctgtcgcccaggatggagtgcagtggtgcgatcttggctcactgcaacctctgcctcctgggttcaagcaattctcatgcctcagcttcccaagtaactgggattacaggtacgcgccaccacacccagatcttttttttttttttttttttttttttttctgagatggagcctttctctgttgcccgggctgtagtgtagtggtgtgatctttgctcaccacgacctccacctgccgggttcaagcagttcttctgcctc[132 bp omitted]tggcctcccaaagtgctgggattatagtcatgagccacaacgccgagactttttttttttttagtagagacgagatttcctcatgttgaccaggattgtcttgaactcctggcttcaagtgatccacctgtcttggcctcccaaagtgctgggattacagacgtgagccaccgtgcccggcttattgtttaatttaatttttttttcttttagagagacaagatatcactctgtctgccaggctagagtgccgtggcttgatagctcactgcagcctcgaactcctgggctcaagggatccttttgccttacctcacaggtgcacggcaccacacccagccaattttatttttattttttgcagagccggggcctccctgtgctgcccagactagctttgcactgctgtcctcaagcgatcctctagcctcagcttcccaaagtgctt[135 bp omitted]cctgcctc[211 bp omitted]atgttggtgtgcagtggcgcgatctcggttcactgcaagctccacctcccgggttcacgccattctcctgcctc[168 bp omitted]caccgcacccggctacaggtagattacttcttaatcacaaagtgaaaattggtatttttacgttgggagagatggcagtcacttccttaaccaagtgattggcttaagcatcactactaggcacctggcatcaattgccacctgcaaaccacacagcaccacctgtgaccatccttgccaaaaatatttaacttaactctaatctgacctttagccctatacctcagtttacaaggggctgaaagaaaggcccagcgacaccatgaggaagcattccagaaggaagcttcccatgaggaagacaagtcaagaaaggggagcattctgcaggacagctggcccaactccttaaaaggtcaacgtgggggccgggcacagtggctcatgcttttaatcccagcactttgggaggccgaggtgggtggatcacttgaggccaggagttcaagacccacctggccaatatggcgaaacccctgtctctaccaaaaagaaaatactaaaaattagctgggtgcagtggcacacacctgtggtcccagctactcgggggactgaggcaggagaatcacttgagcccaggaggcagaggttgcagtgagccaagatctcgccactgcgctccagcctgggtaacagagtgagactggctaaaaaaaaagtgaacgtgggctggg[138 bp omitted]caggggtggtggcgggtgcctgtagtcccagctactccggaggctgaggcaggagaatggggtgaacc[141 bp omitted]aagagacaaaacaatcaaatgcaataggtggcatggattggactcaaattcaaaaggaaacctttataatagacattttggagtcaactaagaaaatttgaatatggactgaatcacacatcatttaatggagacattatttccttaggtgtgaaaaggggccgggctcagtggctcacacctgtaatcccagcattttgggaggccaaggcgggcagatcacctgaggtcaggagttcaagaccagcctggccaacacggcgaaaccccgtctctacaaaaaatacaaaaatttagctgggcgtggtggcatgcacctgtagtcccagctactcgggaggctgaggtagaattgcttgaacccagaagacagaggctgcagtgagccgagattgcaccattgtactccagcctgggcaacaagagcaaaattctgtctcaaaaaaataaaggggggtattgaggttacgtgggggactgttcttgagagatacatgctggagtgtttaggatgaaatggcaggataagtgcaacttcaaatttaaaaatatacaaatgtttaacaaatatataaataaatacagcaaaatattattcttgagtctagttggtaaaaatacgggtgatttttgtattctttcaactttttggggcatggtggctcacgcctgcaatccttgcactttgggaggctgaaacgggaggattgcttgagcccaggagttcaagaccaacctgagcaacatggtgaaactctgtctctacaaaataaaaattaaaaacttatccaggatttgtggcacacacctgtagtctcagctactcaggaagctgaggtgggaggatcactggagcccaggaggttgaggctgcagggagcctcgatcgtggcactgccctccagcctaggcagcagagtaagaccctgtctcaaaaaagagggggcctattgagcaaccccttggctctgaggagaaaacaaaccccaggattctgcaccggagaggcctctgcccccagtctgaacatgtggttgatgcgggctctccagacaggtcactggactctttccaccacacatcccctgtctatttattctttaacttgttcttttataaaacaggtgccaatctaccaataagtaatgtacattctcaagtataagaataggggctcagggctgggcgcaatgactcacgcctgtaatcccaacactttgggaggacaaggcagacggatcacctgaagtcaggagttcaagaccagcctggtcaacatggtgaaaccccatgtctactaaaaatacaaaaattagctgggcatggtggtgcgtgcctgtaatcccagctactcaggaggctgaggcaggagaatcgcttgaacccaggaggcagagttgcagtgagccgagattgcaccactgcactccagcctggacgacagagtgagactccatctcaaaagaaaaaaaaaaaaaaagaatagggtctcagctagcacctacctcgagaatactcagcctactttggagacccctggtttgaactgggagtgaaggaagcaggccgtagttctcgttcatcttggtatccccagcatttggcataggagctcattaactgctcataaaatgaataaataattgaactaatgaatgaacaagtctgacctactggaggccacatgaggagtgcaggggagtggaggagcaacaatccaaggtccttgggctcggtcctgttccaggggcctcacctctcttgcagagcctaggaagccccctatgagccaacctcactctggccctaaggctgcagag[136 bp omitted]catggtgaaaccccaactctgctaataatacaaaattagctaggcgtggtggtgtgcacctgtgatcccagctactcgggaggctgaggcaggagaatcgcttgaacccaggaggcaggggttgcagtgagccaggatcgcaccactgcactctagcctgggcaatagagtaagactccatctcaatgacaacaacaaaaaaaatcacatgcaatatttaaacttctggggccagtaacctatttgggaatccagtgtaagctaaggctcccctcccagcaaacccacattctgaaatcagatactcctcaaagtttgcacaagatctgagatggttcagggactccccactgccaagtccacatgcgggctccaggtaatgaaccccaggactccgagaagccaaggaagctcatggcttatcttacttagtgagacctccctgggttgacatctcgcctctcagctgctacagggctccaggccccctagtcattttcagaagggtttgcaatgaagagaggaaggggctgctgagcccagtggcctggggcatcgccagctctggacctgggtcttctctaggaagaagcctcagcccccacccacagtggggtgtatatgaccccctagttctctaatgggtgctgctggcagacccaggcccctcaggcaagctgtttttggccgttctctgagctcctgctccatgtttctgttttttggggtggataggtacctgctggagtgactcaggtccacagggcacttgtgctggcctgacacacacagatctgagtgcttcaaccaaactgggactccttccacattgttcccaaatccaggagcaagcctctctgaacactttctctgtgcagaacagctctcagatgaccaggaaaggtggcgactcacacatttgcaaccagcacccctgcaatcactctgagaggtagcagtggaggaatctgtttacagatgacagcatggaggctcagggaggctgtgtgaccatcccattcactcaaccacccttttattgagcacctgctatgcaccaggcatggtgctaggtgctagagagtagctgcccttggagtcacagtccaacagtgtggcgagattcctaaacatcatttcaaaccaatgtggcaaatgccatgtaaaagccatggcccaagggttatggggacacataaaccaacttggggtgtggagaggtcaaggaaggctctctagcacgtggttggtgcaacgtcttcaaggacaagaaggataaactgggctcaatgtcatgggaagggaccagcctgttgaaaaagcacggtggcttgaaaccgcatggtttggacagtgctgtgccagcagtctggtgttgtttggcattgctggccagtaagcctagagaaaaatggagccctggctgggcatggtggttcacgcctataatcccagcactttggaaggccaagacgggtggatcacctgaggtcaggagttcgagaccagcctggccaacatgatgtactaaaaatacaaaaattagccgggcgtggtggcgggcacctgtaatcccagctactcgggaaacaggcaggagaagcgcttgaacccgggaggcagaggttgcagtgagccaagattgcaccactgcactccagcctcggcgacagagtgagactccatctaaaaaaaaaaagagagagaaaacaaaaagaaaaagaaaaatgaagcccttctctgacctgaacacccgtggtaagcagtggcaatggagagactgctctcagaggactgacgggagggaggggccagctctgtaaccagcttgttaagaacaactgtaacaaggcatcgagtgccaatccatgccaggtcggcactgacctctccagggtatcactgttcacactgtaaggagatttaagtagcttgttgaagggtgcaccgaggacccgacccttcctcggctctccctctggatacaacgtgaggttaggggttggaggctgagaggaccccgtgaactgcagagcagagctgggacggggagtcaggcctcccgaccgggccgggggcactccctgggcccatgcctcgcgctggcacggagagcggggaggggggtacgcggctgacgaccgtcggggcagcagcagcagcacagcccggcgttggctagcggcccagagtcggggcagggagggttcccgtgcggacgggggctaagaggccgcctccagcccggggcagtccgcgcacccgagcctggagcccggagcctggaggggtggggaggccccgcgcccagggccggaccggagggagagggagagcggtggctcctcccccggcccccgccgctagccgatcggggcgctgggcgggcgccgcgggagccgcagccctttccggggggcggacccggctccggcggcggcacccagctcctgccccgacaggtgcgcgccgcgcgaaggaatgcagccggtctgactcaccagcgcctccttcctacctgcgcgcccgccccataaagcgctgcccgcctcgtccccacccccccaacccccgcgcccgccctcggacagtccctgctcgcccgcgcgctgcagccccatctcctagcggcagcccaggcgcggagggagcgagtccgccccgaggtaggtccaggacgggcgcacagcagcagccgaggctggccgggagagggtgagtgcccgccccagctgggcagccgcgcaggggagctggtcgggcagggccggtggcttttgtctccccttcccctccctgaaggctgacaggccccggtccctctgtccacgctgcgcaggacaggtgcccagcctccccggggtgcgccgggggcagctggcagccaaggggcagggcagctagagaagggtggtgcccatcagacctccaggccagaggagcgccttgggtgcgcctgcgggagaagtgggcagaggccagtggctggtagccctctggggctgggcccctccagggtttgcaaagaaggtggagtagacaccagcctgagtgctgggcccagcccatcatggcgcatctaatgataaaccaacattcctgacttttatgtgaaatttcgttctttctaacattggctcctacttttaaaagccaccctgagaggcagacgccatcccggctccaggcagggcttgctctatgcggtgccacagtccatctggggctggggagtccctgattttccttttctcttggccaagcacaggcctgccttcctcccaaagtcagccccaggcgccttccttcaggaagctctacaggcctcacccaccagccccagggctgtgcccaacactgccacctcctgcagcatccgccctctttcccatggctcagcctctggggtggccctctggctgggactggggctctggggctcctggtgactcccaggagcagggacagggcttctcctctgcccccatggccttgccacaccctgaggacaaggaccaggcacaggtggcatggttgttgctgtccgaaacagagctggcagtgaaggcttggagtctccatcctgggggctgagggaaggacagcaggagggacaggaggggaggtatgtctgtctactcgaccctgatttctcagggagacagaacagccaagggcctggggtccccagacttctggccagctgcctctctggggcgaggaagggcctgggtccctgaggggaggagatgtgacagcgggagaggatagtggacaggagcaggtgtgcccagaggggtccccaggggttgggatgggggccaggggagctctgagcctgtgggtgggtgggcatggcctgtgtgtgtgtgtgtgtgtgtgtgtgtgtgtgtgtccctgtgggggggaaactgcctgtgctgcagtgtgatggcattcagggtggcagtcacacactccagggacctgctggtacataaagtcggggcagcctggtggggtccgggccgcctggagagtaggtgtcctgagcgctgggcccagcccatcgtgatacatctaatgataaacacaaattcctaacttttatgggaaatctcgttgtttctaacattggctcctacttttaaaactttctaaacaaatgaagccaaacactcttgggtgcctcgccaaccctctaactgccattttgtagcttctgcgtggaggctgccatggaggttaaaggcagggcctgcagagcagggccctgtcctggccctcccagtgctgtccgcgggatggggaagttccacagccttctgtgcctggtctctcatctgggaaacgggcagaatgaaatcatctcccgccgggctcctgtgctgagcaatctcctccgtgaagccctgggctcatatggcagtcacagtgtgggaatcagcactgcctgaggggctgtggccagggacagtgggaggaagagctgggctcagctctccaggcctgtacctgcctgtgtaatgatgcctgggaggcctgagcctgcagcctgtattgtgtagcatgtgggtgtggcggctacaccccgaggctgcaaggaagtcatttccctctaggaaccctgctgtccccaccctttccctgctggctcagggctgcctcccagtccctgtgccacaacaggtctgacctgcatgtgttggcgctgctgtggcctcctccaggctgcacgccttagaagcaggctacgccttcctgcccttggcctgagaagggcttctccagcacctcggggaccccagcccccagaccctggggtggccactgccccagaagccgggctgagacaggattcaatggggagggcccgtgggcagggcagaggcttgggcccctgggagacctggccctagagaaagaggcgcggtgctcacctttgccccggccttgcaggcctggatggctctgccgccagcctcttttcttgtccaggcttcaggctgagcatctcttagagggcctcagggatgtccagtcctgccctgaaggccgctgaggacttaggatggtttaatactgaacccacagccgctggggacgccttgaggggagccacagtgtgtgtgcatgtctcactctgggctaacttgtgaaagggtgaacagctcaggggcccagaaaacttaactctggggcaggcagaggtacaggggagggcagatgattcagaccccaccctgatgggccgggcagtcactgcagaacccaacccggtgcagtaagccactgcgggcagctgtggcccagccccaggccccagatattgggaggggcccctctcctcccggctgtgccaccctcaccaaagggtaagtgggccaggacagaaggagcaggaggcagagctgcggccccctctcagggaggcaccctcattggatgaccctgtcatggccaagcctgacccaggctcactgggagctaaaaggcaaagaagaataaacccacatctgccctcagggagcccagtgctgagaggcctggcactgggacaaactcgcaaaccagagtccttgagggctggagggggcctcccggggcagggcataggccactgcagggatggcacggaacagggcagcggaaaaggcaggagtccgaggcccagggccctgcctctggcggctgggcgcccttggtcacattgttggtgctcagagcctcagttcccacagctgtgcagcgagaggaagctgacggcaccgaccatggctgtggaggcctcatgtgtcaattgttgctgttctgcaggaggaagaggatggcagggccacgccccagcccatgggccaggctgctcctggcagccttgatcagcgtcagcctctctgggaccttgggtgagtccacgttgccctgcagccccctcctggcaggatcatcccttgggcaggcattgcccttgcacggggatctcacggtgtctcacctaaacacgcttggccattcagcaactgaccactgcccaccttcagggctggaaaacttgaggctccaagctcttcagcctagagaagcttgagccctgaccacggggcctgagaataggagcgaaggaggctgtgtctagaggaaagaggagacacccacccaggactgaggcacccagaggatgcactgaggccccagaggtgtagtcaagagggttataggaatttggagaagagaggcactgctgacgtgtcacttgctctctgagtgtcactagtggacaaatcactggagccagctcctaccacttgaattttgtctgttagagggggtcctgctggtggcttgaaatagaccacgacagaaatgtttacaccacagaaattggcaaacgctacacgtcaagcaccagagaccagagccgttgttatttttttatttaattcaatgtatatgtagaaacatgctctcactctgtcgtcccggtgaaatgcagtgatgccatcgtggctcactgcagcctcaacttcccaggctcaagcaatcctcccaccttagcctcccatgtagctaggaccacaggcatgcaccaccatgcctggctaattaaaaacaatttttttgtagagacagtctcactatgttacccaggctggtctcaaactcctgagcttaagcaatcttcctacctcggcttcccaaagtgctgggattacaggtgtgagccatcgcactggccaccacagccattgttaaacactgaccagcacaccattgcctgaagcccaggagacctcttactgtgtacaccaggtgcacacagtaggtcctcactgtgatttttaactgagcagagccaaagggaaatctagagttttacttcattcgttactgaggacccactgtgtgccaggtgtgccgggtgctagggctaccgtgataaacaagacaccattcccttcaccctagaaggggctcagaggacagacaggccatgtggcagtggtctcgccgtgaggcacaagctgtgatggaggaggtacctgaaaagggtgctaggtgcagctcatcaaaggtaatggggaaggctgaggaccgtctggctggacctgaggaggcagcaggccagggggtggccagggtgtgccagcaccgagtgtgccagtgccactgtctcagtccccaccttctgtccttctggcttgagtgggaagtcccaggtttgaaatcacagcttgtttctagctgtgctacctggggcagatcacatacccctggcctctgtaaaatagggaacggctgggtgcagtggctcacgcctataattcccagcactttgggaggccaaggtgggaggatctcctgaacccaggaatatgagaccatcctgagcaacatagggagcccctgtctctacataaaataaaaaattagctgggctacttgggaggctgaggtgggaggattgcctgagcccaggatgtcgagactgcagtgagctgtgatcatgccactgcactccagcctgggcgacacagca[133 bp omitted]catggtggaaccccatctctactaaaaatacaaaaattagccaggcatggtggtgcccacccattatcccagctactcgggaggctgaggcaggagaatcacttgaacctgggaggcggaggttgaagtgagctgagatcgcaccactgcactccagcctgggcaacagagcaagactcgtctgaaaaataaagtaaaacaaaataaaaatacaacaacaacaacaaaccaaaataaatacataaggccgggcccggtggctcccacctgtaatcccagcactttggaaggccaaggcgggtggatcacaaggtcaggagatcgagaccatcctggctaacacggtgaaaccctgtctctactaaaaatacaaaaaattagccgggcgtggtggcgggcgcctgtagtctcagctactccagaggctgaggtgggagaatggcgtgaacacgggtggtggagcttgcagtgagccaggatcacgccactgcactccagcctgggcaacagagcgagactctgtctcaaaataaataaataaataacataaggagggaatccccatctctccaggtgaaggtgcaggtgggaaagtgcttgcctttgctgagcgcctccccattcatgtgcccacatctgtccccccagcaaaccgctgcaagaaggccccagtgaagagctgcacggagtgtgtccgtgtggataaggactgcgcctactgcacagacgaggtgaggacctggcccgggttggtgtggaacaggcaagggtcgggaatagctggtggaaatgaatctagggttggggcagccagggaatgggtgctgcccccagtgaccccctgtccttctggccagatgttcagggaccggcgctgcaacacccaggcggagctgctggccgcgggctgccagcgggagagcatcgtggtcatggagagcagcttccaaatcacagaggtgcctggtgtggggactggggtgggggctccccatgctcagcctggctatttatgggggtgtatagtgccccttggccgggctgggcccccatcgggcctccggagtgaccctctagccagctgtccccttccactggctgcaggagacccagattgacaccaccctgcggcgcagccagatgtccccccaaggcctgcgggtccgtctgcggcccggtgaggagcggcattttgagctggaggtgtttgagccactggagagccccgtggacctgtacatcctcatggacttctccaactccatgtccgatgatctggacaacctcaagaagatggggcagaacctgggtacggcagggccagagtggaggacagcagggcaggagggggacaggtgggcgtctgcttgggaggccaggactcaggacagctgcacccacccagaaggaaacactggacatttgagcccccaaaaaccttcccttccattctcaagggaagaatctcggtcagaccctactcaccactggggacttctgagaaggcccagggcaggcgggcagtggagccatctggccctgacaaggagggcaccccctgccacgaggctgtggggaagcttctgctcctcagagctgggctgcattcccagccaccctgcccttgctgtacgcataactccagacccccagtcccatttccctcatccataaataggaacagacaatgttgtgagcatgaacctttgtccagcatgcaaagcgttaacctccctcttcctcccttctgagccagcccttggtggggggcccgtgtttatgccaggcatcagggctcagctatcccctctctgtccttttgacatccagctcgggtcctgagccagctcaccagcgactacactattggatttggcaagtttgtggacaaagtcagcgtcccgcagacggacatgaggcctgagaagtaagtgactgtgtgggtcccgcaggtgggcaagggtccaggccatgtgacccccactcctctttcacccacaacttaaaattatccttctacggctgggcacggtggctcatgcctgtaatcccagcactttgggagaccagggcgggcagatcacctgaggtcagaagttcaagaccagcctgggcaacatggcaaaaccccatctctactaaaaaatacaaaaat[181 bp omitted]ctgaggcaggagaatggcgtgaacccgggaggcggagcttgcaatgagccaggattgcgccactgcactccagcctgggcgacagaatgagactctgtctcaacaaaaaaaaaaaaaaaaaaaaaattagccaggtgtggtggtgggcgcctgtaattccagctacttgggaggctgaggcaggagaatcacttgaacccaggaggcagaggttgcagtgagccaagatcgtgcataccgcacaccagcctgggtgataaagcgagacttggtctcaaaaaaaaaaaaaaaaattctccttctagttgaaacgagccaggggcactggggtctgcggcgtcttccccctgtgacactctctctccctcccacctctgcccaggctgaaggagccctggcccaacagtgacccccccttctccttcaagaacgtcatcagcctgacagaagatgtggatgagttccggaataaactgcagggagagcggatctcaggcaacctggatgctcctgagggcggcttcgatgccatcctgcagacagctgtgtgcacggtgggcactgggaagggtgctgccagcctaggccaggggtgagcacttctgggcaagggcctgagctgccccctggcctgctctggtgccaggctcacaggccctgagggaaagcctgggagcctgcaaccccttcaccctgagacaagctcagactctgtgagtaggtctcagttacaatctgagttcagatgtgcctggagccacggtcccctggcctgagcagtcacagcctggtttcgtatcagctaccaaggcagacctgggctttagcgttctggaatctttagtaccctgaacccaccagctgcccagactccacctgttctgggcatccaaataagccatttcctttgatatgtacatccatttgttcattctgaaaatgacataccc[135 bp omitted]ccctgtctctacagaaaacacaaaaattagctgggtgtgatgcacgcctgtggccccagcgccttgcgggggccgcatctccagctcctgtttctcagcgttgtcactcagtcatgtgccgtcagatgcatctttcatgagggcacttgctgtgaatccagtggcttaagcccagccccatgttgggacccgcgttccccgtcctacacgacgccgtgatgcgtgtcagcaggcagcctgctcagtgggcacgccccgccttgccttccccagagggacattggctggcgcccggacagcacccacctgctggtcttctccaccgagtcagccttccactatgaggctgatggcgccaacgtgctggctggcatcatgagccgcaacgatgaacggtgccacctggacaccacgggcacctacacccagtacaggacacaggactacccgtcggtgcccaccctggtgcgcctgctcgccaagcacaacatcatccccatctttgctgtcaccaactactcctatagctactacgaggtgcggggcccaggtcccacgggtgggaggtggtcaaggtagggggtccatggagcttctcagacacctctccctccctccctccctccctccctcccttcctcccttcctccctccctcttttcctccctttccttcctcccttcccaaagcctttagaccccccaaaatgtgggccctagtgggaaggggaggtcatgtgcccatcttccaccccaactcccaagcaggtgggggctaagagggcaggctctgcgacaccacagtaggttccaggcctcagtttccccatcctcaaagtgggaagaatcctagagctgttcagattcatggagatgcttagcctgagacctggccttctctcccgcagaagcttcacacctatttccctgtctcctcactgggggtgctgcaggaggactcgtccaacatcgtggagctgctggaggaggccttcaatgtgagggcagctcaggctccagagtctgagcccttctggggcagggcaggaagtgggcagggtgggcaagaggtgtcttggatcacggtggagaaatgggtctgggacagaccagtgaggaagggtctctagctatccctgaggccccgaggggccacctgggcctggccctggctcctgcaggctctgtgataccccgcatgatgccagccacacttggaggttggggtggagcacagaggccccccacagagcactgatcaacctccttcctcctttagcggatccgctccaacctggacatccgggccctagacagcccccgaggccttcggacagaggtcacctccaagatgttccagaagacgaggactgggtcctttcacatccggcggggggaagtggtacgcctctgtgggggcagcggggtgggggataggcacagcgccccacaccgagtggaatcgtttaaaacagcggtcaagagcgtggcccctggagtcaggcaggcctgggtgcagatccctgggcctagccgctcggatgagcctaggttgctcctctgcttgttggtttcctcggcatgcaagcgtcgagcccggaggcttgctggggcagtaaatgggttagtgtcacgaagcccagaggccctggccactgtcattgtcgctatgattgtgactgcgctgggaaggagggagtttccagccctgagggaggtgagcaggagctcatttcagggatccagacatctcctaggaacttgggggccgagggccttcaggcatcgatggccccctggtccttggggctgggcctgccttggctgaccacggggcccctgcagggtatataccaggtgcagctgcgggcccttgagcacgtggatgggacgcacgtgtgccagctgccggaggaccagaagggcaacatccatctgaaaccttccttctccgacggcctcaagatggacgcgggcatcatctgtgatgtgtgcacctgcgagctggtacaacgcagccccgcagggcgggaggggagagctgagccaagcacccagggaccctgaggaatgaagcaggactcctgtgccccatatcccttgtggggtttcccgaggcacacaggagagcggaagtgtccagtggccccggtcctgctcccccgacgcaccccaccatggtctctctcattccagcaaaaagaggtgcggtcagctcgctgcagcttcaacggagacttcgtgtgcggacagtgtgtgtgcagcgagggctggtgagtggggaagggagttgggcacccaggacaccagtggcccctgatgggaaagctgggctcctgcaggggcctggccctgggtgcaccttgtacacctggctgggggtggggcggcaatcaaagaaacggctaagggcggggcacacccagttgttggtcaaacccaggtcaaagcactttgaaatacagagatatatgggctgtctctagaaagaggtgtgaggattgagacggggttggctgttggggctggggtctggatcttgggggacaggcacacgaggcttcctttttgctccatgcctttggtattctgagtcctgtgtcatattgcctgatcagaagagagctcgtaaatgcacggcagtaagggctttagcttcaggacactgggcgagcttgccacaacttgaggcagagcagtggggaaaggacactggaaggggtgacatgacagggcactggggtttaggtctcagctcagccacttctgtctgcatgactgggagctgcctcggccctctcagagcctc[131 bp omitted]tgaaatcccatctctactaaaaatacaaaaaagtagctgggcgtggtggtgcatgcctgtaatcccagctactcgggaggctgaggcagaattgcttgcacctagaaggcggaggttgccgtgagctgagatcgcgccactgcactccagcctgggcaagaagagcgaaactctgtcttgaaaaaaaataaaataaaataggccaggcgcggtggcttacgcctgtaatttcagcactttgggaggccgaggtgggcggatcacaaggtcaggagatcgagaccatcctggctaacatggtgaaaccccgtctactaaaaatacaaaaaattagccgggcgtagtggcgggtgcctgtagtcccagctactcaggaggc[133 bp omitted]attaaatgggacagcaaaagccccagctttcctcctgggctgtttcggggaatgaccagttcctccttcaggagtggccagacctgcaactgctccaccggctctctgagtgacattcagccctgcctgcgggagggcgaggacaagccgtgctccggccgtggggagtgccagtgcgggcactgtgtgtgctacggcgaaggccgctacgagggtcagttctgcgagtatgacaacttccagtgtccccgcacttccgggttcctctgcaatggtgagcacaacaactgcggccaatgctgatggcggggtagggagtggacagcaagcatgactttcccgtcaggacccaggttgggagagccagacttggaatcagaatccccaagttcaggcccagcccactctggatgccctgagggccgcccctgagtcctgccccaacctgggcctgacttccctcatctgtaacgtccatgcccaaggtcactgttggcaggactttcccctggttttaagattccaactcccctgaggttctctctggaagttcagttctatgcccaccccacttctccacacccctatctcattagagtgggtgccacccagctcagccctccaatggctggcaggtatatggcattatgatctttcctc[135 bp omitted]gcaacctctgcctcctgggttcaggcgattctcctgcctcagcctccctagtaggtgggactataggcatgcaccaccatgcccagctaattttgtatttttagtagagacagggtttcaccatgttggccaggctggtctcgaactcctgacctcaggtgatctgcccgcctcagcctcccaaagtacacatctgtaatcacacctgggattacaggtgtgagccactgagcccggcccaaagatgctaaatttctacctggaaggcctggagcttcctctgtattcccatgggtccaggccataggcatacagtctggccaggaacatcagagctgggcaggatcacagaactcagacaaggggacatagggaaggattggtagttgaatggaggaggatgaatgaaaatctactcatcaaatacttatgaagccctcactgtatactttccaagcccctgcttttctactctttcttctgttcttgcttttgttcaccatttcttctcttcgactgtctgtccctgagtgtgctcagagaaacagaagagagaactgggcaccactggagaaaggcagacaagtggcacagagggaggtatgagagaggaagggaggaaggtgcctctggggaaggaggcagggccagagtacaaagggcttcggttctagtccagagcaggacttcatcctttggacaaaagggggtcactggaggttttactttcattttctaactatttgcatattaaccttgtatctagtcaccttgctaaacgcacttatgaaatctaataatttgtctgtagattcttctggatactttgtgacatgttcctcacacttgcaaataaagacaattttattgattgattgattgattgatttttgagacggagtcttgctctgtcacccaggctagagtgcagtggcatgatctcagctcactacaacctctgcctcccaggttcaagcaattctcctgcctcagcctcccaagaagctgggattacaggggcccaccaccaagcccagctaatttttgtatttttagtggaaatagagtttcaccatgttggccaggctggtcttgaactcctgagctcaagtgatcctcccgcctcggcctcccaaagtgtgggattacaggtgtgagccaccacgcccggctgacagttttatttcttttttcttttctttttttttttttttttttgagacggagtcttgctctgtcaccaggctggagtgcagtggcgtgatctcggctcactgcaacctctacctcccgggttcaagtgattctcctgcctcagcctcctgagtaactgggactacaggcatgcgccaccatgaccagctaatttttgtatttttagtagagacgaggtttctcca[137 bp omitted]ttctgaccttattgcattggcagggacccattagaggttcttagccaggggagcaggagccacatgattggatttgttttgagataattactcaggctgcagagtggaaggtaggtaggatggaggcagagatggagggaaggagattccaggaaagtgaggaagagatgacttctaccccaggctagcggcaccctggctcccacagctctgttcccacaggccctccctgccaggtgggcagcctggactacaggcacagatgtagctctcatctcccttccttgtccctctctgcagaccgaggacgctgctccatgggccagtgtgtgtgtgagcctggttggacaggcccaagctgtgactgtcccctcagcaatgccacctgcatcgacagcaatggggtaggcctgggcataagacagacagtgtctgtcagcaccacccaccctctccagagagaaccctatggagagaggagagggagcaggcagggatggggcacagctggctcactggtgccccctcctaccccagggcatctgtaatggacgtggccactgtgagtgtggccgctgccactgccaccagcagtcgctctacacggacaccatctgcgagatcaactactcggcggtgaggctaagacctacgaggtgtgggcgtgggaacagggcaggcacagggcagtgtgggcaggaggggctaagcctgatgccacaggagctggccaagggcaagaggtttggggagcgggggtctggcagaggcccacccaacacagtgcctgtctgccccgcctttccccgccaagatccacccgggcctctgcgaggacctacgctcctgcgtgcagtgccaggcgtggggcaccggcgagaagaaggggcgcacgtgtgaggaatgcaacttcaaggtcaagatggtggacgagcttaagagaggtaggggcaggggctgagggttggggttgctgagagcctaggcagcgggcatccaacggggcaagggtgtcatcacctggacgggggcttgcagtctgggctaaggtcacacagtccggacaggaactccagagctgggagggaccacagaacccagatagaggacaccgaatcccagaaaagggtaaaagcctgagcaggaggcacagaacccaggcggtgggacacagtctggcccaggaagggaccaagagtcttggtgggaggcacctgacttgggcaggggcatgcacccagcaggggtacatggtcacgctgtggagacacgcagcctcccctcctcgagatcagatacgttttctggaccctgagttcctgggtgatgtccaggtcagggaagtgggggaggtaggtttctaggctctgatgctcctgagcaggggagcccccaccacacccgttcctgtgcctggtgagagcacggctttgcaaggacttccactcttccccaggaggccctgccgtgggtgaggcagatcgcagagtaggggccccctcaccagaccctgggtcctctggggcggaggggtgtggctggggtgccctgctgactggctgtgggtacagccgaggaggtggtggtgcgctgctccttccgggacgaggatgacgactgcacctacagctacaccatggaaggtgacggcgcccctgggcccaacagcactgtcctggtgcacaagaagaagggtgagctggtggggccgggcgcagggagggggcgtgtggccagagctcggtggggaggacaggcaccacctccccctgcctcctcctctccagactgccctccgggctccttctggtggctcatccccctgctcctcctcctcctgccgctcctggccctgctactgctgctatgctggaagtactgtgcctgctgcaaggtgagcacccagggtgcctcccaaggccccacatcccagggtccccaccccaacagggcccccaccctccaccagggtccccagtccccgcctgagttctcatctccccagggtccccaaccccttcctgggtccccacctccccagggtccccatcccaacagggtccccatcctccaccacggtccccacctccccagtgtcctcaaccccctcctgggtccccacctcaccagggtcccctctctgacagggtctccaccctccatcagggtcctcctcagggtccccaacccccaccagggtccccagcctctccacccaccatccccactcctgcagctttctagccagaggcttcagcccgtagagtccagctgtctggattctggtcccagctctgtgaccttgggcaaattacttaatctctccatgcctcagttccctcatctgtaaaatgaagatcatagaattgacctcagaaagtggagctgaagcttaaattagtgaagttcagaagggactgacccatagcatgcaccatcgcccccacccccaccttggcaagacccacaccaaccccatccagcttccggagtgacagtaatgatgatgacacccatgagctcttagcccgagtcatcctggagccccagcccccagctcagcccttgccagcatccgttctctgcttagctcagtgttcctctttgtgctgtcgccacagcatgtccacgtgactccatttccccgccccccatcaccccatgaggtcagtggggcaaggtcaccatgccctatgacagatggagaaattggggctgagaggcaggtgataaatgcacagtcctcagaaggggctgaggcaagctgagcccacatcttccccagctctagtgcccgcccaggacccccactccatcagccatcagtggccagatccctgagagcacctgctctggggtcagccacgtgcaaaaggcctgggagccacaacagggaagaaagggccctgcccgcccgcagctggcggtcactggggagaacagacaagagaaagcgtggaggatggcatagctcagagtagggattgtaggcggcagaccacactccgtagtaacccccagtgttgtgggatattaatgtgcattacataggcaaggagttatgtgatcaaataggtttgagctaggcacggctgcgcgtgcctgtagtcccagctactcagaaagctgaggcaggaggatcacgagtctgggagtttgaggctacagtgagctatgattatgccactgcactccagcctgggtgacagagtgagactcaaaaagaaaaaaaaaaagaaggtttaagaaacaagtttcttaaatttaagttacagtggctcacacttgtaaccccagcactttgggaggccaaggcgggtggatcacttgaggtcaggagttggagacaagcccggccaatatggtgacaccccatctctactagaaatacaaaattagctgggcatggaggtggatgcctataatcccagttactaggggggctgaggcaggagaattgcttgaacctgggaggtagaggttgcagtgagccgcgatcgtgccactgcattccagcctgggcaacagagcgagaccctgtctcaaaaaaaaaaaaaagaaaagaaacaagtttcttctctgcaggacttctcagaggctttgataaagtcctgtgcctaacctgcaagaggggcatggggaatgaattcagtgcttcccaagtgaacctgaccacagaacctttacagagcacccggcaggatgagagttccacggcgcaaactttgggaaccctctgcccccatccccctctatgcccttgtgtgccatgcttacaccctgctaccacctggatattctggtgtctggggaggcactgtcacccctcttgaccattggcatggggcggggtggctggaagggcttacctgggccagggcagctgtctcaggcctcaccctcacccaccttgtctcctaggcctgcctggcacttctcccgtgctgcaaccgaggtatgggcctggcatcgcaggggcagcaggggctctgactgctctttctctgagctggggtggagggaagctgaacctggaacggcagaggctggaggctctggggtcccacctgaagaggttgggctgtgcgggtctagggaggggtgccgtgctgaggaccccatcctgcaggtcacatggtgggctttaaggaagaccactacatgctgcgggagaacctgatggcctctgaccacttggacacgcccatgctgcgcagcgggaacctcaagggccgtgacgtggtccgctggaaggtcaccaacaacatgcagcggcctggctttgccactcatgccgccagcatcaaccccacagagctgggtgagggcggggctgggcgccacagctctgggcagtgcccttcgggccctctgttccagatctgggatcacagcatgcctcttctctgggtgtggggtgcaggcacagggctcagccaccttttgccctgtgctgatggtgctatgaacctcatgcctcggtgtgcgtggcctgctggccaggcatcccctgatcctagcatggttgctggagggatgctctgtggtgcctgtcatgcagggggctgaccacctccatctcaccccctcccaccgcctttccttagtgccctacgggctgtccttgcgcctggcccgcctttgcaccgagaacctgctgaagcctgacactcgggagtgcgcccagctgcgccaggaggtggaggagaacgtaaggacccaggaactaggcctggccggagatgtgggtatgagggcgggtgaggtgggcagggcagagcgaatgcggtcgtggtaccgagattcattaactaggggagaggggtctctctggacctgtgcctggcagggggcatcctgggatctgtttccagagggcagaaggccagagcctgggcccaggatgctgccccacggggcatgccccagccaaccctgaggatctctgggtacagaggctgcctggctccctgggtccccagcctgagggcttgccacggggtggcctaggcccagcctcacgcccctcccttgcctggcagctgaacgaggtctacaggcagatctccggtgtacacaagctccagcagaccaagttccggtgagtcccggggtgcccgggttgggtgggggagccgctcctaccgggactccaggagccgaagcccccaggccgatcaggcctccacttcagggctatctagctcacagcgccctctttgtccccacaggcagcagcccaatgccgggaaaaagtgagtagaagactcgtgggtgagagggcccccacttcctgcccgcctgtccccagcccagccactgcctcgtccgtccctactccatctccatcccataggaagggagggtcagatgtgtccgtcaggttcggaccttcattcgttcctttgaccatttcttcaacaaatgctaatgtgaagtgcttgctatgaagtggcccctggactagagcaggcaaaagcaaatcaacccagtccctgccctcatataggtgactgtccagccccccacccggtaccagcgatagcaggtacccatctccatccgctccagtgtccaagaccctgatcttgggtgcacctctggggaccaggcaggttaccgagaggatgggccagcaggtcacacaccttttttcccaggtcctacatcgagtcctggcccttcatggggagagagagggagtgaggagggggtcttgatgcagggacagaagagctagaatctcagcacatgaccatcagtaagaaccgttggctgtgcgtggtggctcacacctgtaatcccagcactttgggaggctgaggcgggtggatcacctcaggtcaggagtttaagactagccaggccaacatggtgaaaccccacctctactaaaaatacaaaaattagccaggtgtgttggtgggcacctgtaatcccagctacttgggaggctgaggcaggagaatcccttgaacctgggaggcagaggttgcagtgagccgagattgcgccactgcactccagcctgggcgactgagtgagaatccgtcttgaaaaaaaaaaaaaagaatggctgaccagcatttcttatcctgctacgggccaagcattgtcctaagggctttccgtgtgtggtcatcttatccaaccctctcgtcaagcctgtgaggtagagatcactgctgttcccattttgcagatgaggaagctgaggctcaaaagggttaagtgacttgcccaaggttacccagctatcgagaactagaaccagggctagggccgcggcagcctggcctgagcacacacacccttagcatctttgctgtccagcccttgatgaggtgggcagagaagcccatttcacagaggaggacgctgaggacagggaggcgccatggctgggctgaggctgcagggtaaagggtatggggctggcataggcctggagcactgcctgcctctgaagaccctgcacttcttgctgtcttacatcctggcccctgaaggggagaagacaggcaggagggacagggcagcaggtgccagcctgacccctccgctgcctgaaccttccaccctcgacccaggcaagaccacaccattgtggacacagtgctgatggcgccccgctcggccaagccggccctgctgaagcttacagagaagcaggtggaacagagggccttccacgacctcaaggtggcccccggctactacaccctcactgcagaccagggtaggagggcgggtccgctgtgccactgcctcgcacctcccgcctgtgtggccctgtgacccacctctgaccacctccgaacccccacccagacgcccggggcatggtggagttccaggagggcgtggagctggtggacgtacgggtgcccctctttatccggcctgaggatgacgacgagaagcagctgctggtggaggccatcgacgtgcccgcaggcactgccaccctcggccgccgcctggtaaacatcaccatcatcaaggagcaaggtgggtctgggtggggagagtggggaaggcagacgggggctcgggggcactggttcctcctgcttaagtggaattgcgacctggccacgtggcctgggctagtcacttaacctctgcaagccttggtttctccatctgtaaaatgggtaagggctcttttacggaatgcgtggctgttcacctcgccacagtgcctgcctggtggtgagcgctcagtaaatggaagcttctgttgcatcctcataagggccagccccttgctcctctctatctagaaaaagggttggccaaggcatcacaccgtggacatctgacccctcctcccacctgtgccggaagccacaggcctcaggcctgttcctgctctcctccagccctggggctgaaggctccatctctggtcctgcccgtgactggcctccctcctctgcctggcccttccaggatgtctgctggacactttgttccagaaccacttttttttttcttgggacagagtcttgctctgccacccaggctggagtgcaatggcaccatcttggctcactgcaaccgctgcctcccaggttgaagtgattctcctgcctcagcctcccgagtagctgggattacaggcactcgccaccacgcccagctaatttttctatctttagtagagatggggtttcgccatgttggccaggctggtctcgaactcctgacctcaggtgatccacctgcctcagcctcccaaagtgctgggattacaggcacaagccactgcgcccggcccctcatctttttctggaaggattttccgtttcgctcctgtgcccttcccagagggcaatgcatagagggaaccaagcggactcctggattctgggctgggctgggcagggtcacaggagagcaggaggtgggaagggactgggcccagcacactctgacaaatgcccgggctccttgcagccagagacgtggtgtcctttgagcagcctgagttctcggtcagccgcggggaccaggtggcccgcatccctgtcatccggcgtgtcctggacggcgggaagtcccaggtctcctaccgcacacaggatggcaccgcgcagggcaaccgggtgaggctgcgccacagggtcgagggtgcagcccggggggctgcgtgggcaccgcattgggttcccaagacaaagcagcacatggcagctgcttgagtccctggatactggccgtgcccctggctggcctcccaaggacacgtccacctgctcctgccaccctgtggcaggggagtctcacctgcccagggtgccagtgacacg[132 bp omitted]gcaacctccacctctcgggttcaagcgattctgctgcctcagcctccctagtagctgggattacaggcatgtgccaccacgcatgtctaattttgtgtttttagtagagacggggtttctccat[140 bp omitted]gaccattcctgtcccctcctacaactcaggatccacagggtagccaaacctcttggagataaactccccctatatgccccagtccagggggctttgggtttcttgagctgggatcgaagaccccatgtccccaggccagactccccaagggctgtcacaatttgccaagcagcaggagcaacccttcaaggcagggagtgccatggctggaccagcatcaccttcactgctgagccccagtgctggggtacagccaaatcaggtggcacacaggctggactgggtttacaggcttcatagttttgtttcttttgttttgtgtggggattttttgcttcttaatttttgggggagacagggtcttg[131 bp omitted]ttttgccatgttggccaggctggtcttaaactcctgatctcaagtgatccgcccacctcggcttcccaaagtgcagggattacaggtgtaagccagtgcacctggcctttctagtttttaaatgttggcaacaaatccataattaaaaacaaaggcggggcatggtggctcacacctgtaatcccagcactttgggaggctaaggtgggagaatcacttaaacccaggagttcaagaccagcctaggcaacgtggtgagaccatgtctatacatataatttaaacattagctgggcatggtagtgcatacttgtggacccagctacttggaaggctgaggcaggaagatcacttgaggccaggaggttgaggctacagtgagccatgttcatgccactgtacttcagcctaggcaacagagtaagaccctgtctaaaaaaataataataattaattttttaaaaatcaaacaaaaaaacaaagaaacaaaacctggctcagtgcagtagctcatgcatgtaatcccaacactgtgggagggcacagtgggaggatcacttgagcccaggagttgcaggccagcttgggcaacatagtaagaccctgtctctattttaaaaaaataataataataataaaggccaggcgaggtggcgtatgcctgtaatcctagcactgtgggaggccaaggcaggtggatcgcctgaggtcacgagttcgagaccagcctggccaacatggtgaaaccctgtctctactaaaaatacaaaaattagctgggcatggtgacacgtgcctctaatcccagctacccgggaggccgaggcaggagaattgctggaaaccaggaggtggaggctgcagtgaaccgagatcatgccactgcactacagcttgagcgacagagtgagactctgtctcgaaaaaagaaaaaaaaaattatctcaaaagtaataaagtctcgcctccctgggcccacaggcccattcagcaaacataggggagcgcgtagtcagcaggcccgggctgcctggccacatcctaattttatttacttctttttattgacaggaactgttctcattatttttccaatgtccccccataaaaattccaaagaataatttttttcttttaagagacaaggtctccctctagtccagggtggagtacaggggcacagtcctagctctctgcaatcttgaactcctgggctcaagcagtccttcaacctcaacctcccaagtagctgggactacagatgtccaccaccgcacggctaattttgtatttttttttctttgagacggagtctcactctgttgcccaggctggcgcgatctcagcttactgcaacctccacctccagggttcaagcgattctcctgcctca[133 bp omitted]gcctcccaaagtgctgggattacaggcatcagccaccgcgcccggccattttatatttttagtagagatagggtttcgccatgttgcccaggctggtctcaaactcctaggataacatgatccttttgccttgccttctggctaccctgttacacttgtataaagatgctttgaggctgggtacagtggctcatgcctgtaatcccagcactttgggaggccagggcgggcagatcgcttgagatcaggagttcaagaccagcctggccaacatggcgaaaccctgtctgtaccaaaaatacagaaaattatctgggtgttgtggtgtgcacctgtggtcccagctactcgggaggctgaggtagagcccagtaggtggaggttgcagttagccgagatagtgccactgcactccagcctgggtgacagagtgaaacccctgtctcaaaaaaaaaaaaaaaaaaaaagctttgatatttgttttttaaaacattttaatttctcacctttttatttttaaaaacttcaacttacagaaaaatggaaggaacagtaaaactagcacccatttaccctttacatagattcaccgattgctaatatttgctttctctctctttctatatagatagcaacatagaaatataaatagagatgtggacatctgtatcttcacattgattatactagtacctaaaattagtccatattccagccaggcgtggtggctcacacctgtaatcccagcactttgggaggctgaggcaggtggatcacctgaagtcaggagtttgacaccagcctgaccaacatggagaaaccccatctctactaaaaatacaaaaattagccgggcatggtggcacacgcctgtaatctcagctactagggaggctgaggcaggagaatcatttgaacccagtgggtggaggttgcagtgagccaagattgcgccacttcactccagtctgggcaaaagagcaaaactccatcccaaaaaatatataaaataaaataaaataggtccatattccaatgtccccttgttcggatgtcccaataatgtcctttatagcgtttttccccccaatgcaggaactaatcaaggatttggcattgacttttgtcacgtgtcttgactcctttaatctagaaaagtttcctggctttgtcttccgtgacactgacttttgttaagacaaggtctcgctctgtcacccaggctggagtacagtgcctcactgcaacctctgcctcccgggttcaagcaattctcctgccttagcctcccgagtagctgggattacaggcaccggccaccatgccgggctaatgacactgacgtttttgaagtatccatgtaggttgcttgcaggcagctccctggtttgttttttgtttgtttgttttacaactatgggtctcactttctgagttgggtggcatgaggttgcctccccagccatcgccctggctgctgcgcctggaattgaaatcttgccctgaagtgccacctagtggtcttctatgtgaaggattttctttttcctcccag[138 bp omitted]atagggtaaccgtgcctctacaaaaaaaaaaaaaaaaaaaatagccaggtgtggtgcacgcctgtagtcccagctactcaggcggctgaggggaaggatggcctgagcccaggaggtcaaggcttcagtgagctgtgattgtgcccctacactccagcctgggtgacagagtgagaccctgtctcaaaaacaaacaaacaaacagaaacgtggctgggcatggtggctcatgtctgtaatcccagcactttgggaggccaaggtgggaggatcacttgaagtcaggagttcgagaccagcctggccaacatagtgaaaccccatctctactaaaaatacaaaaattagctaggcgtggtggcaggtgcctgtaatcccagctactcaggaagatgaggtgtgagaatcatttgaacctggaaggtggaggttgcagtaagccgagatcatgccactgcactccagcctaggtgacagagtgagattacgcctcaaaaaaaaaaacaaacaaaaaaaacacaaaaacctgaacctcgtgtaagtactccacccagcaagcagggatggtctctgcagtgtccatgaggttgggagggagcgtgtggccatgactcttgcctcagcccccagccatgaccctgaccctgaccccctccactcccaggactacatccccgtggagggtgagctgctgttccagcctggggaggcctggaaagagctgcaggtgaagctcctggagctgcaagaagttgactccctcctgcggggccgccaggtccgccgtttccacgtccagctcagcaaccctaagtttggggcccacctgggccagccccactccaccaccatcatcatcagggacccaggtaggcagagcctgggggtcggcttaagcaggaggagagggaagactggggggtctctcaactaggtctgtcagacttagcaaatccaaacacaggacgcccaggtaaatctgaatttcaggtaaacaacatacacgttggtaggataagtatgtcccatgcaatatttggaacatacttatccttttttttgcaaaatgggctgggtatactggctcacacctgtaatcccagcattttgggaggccaaggtgggaggatcacttgagcccaggagttctagaccagcctgggcaacatagtgagacctcgtctctacaaaaaataaacaaattagcttggcatagtggtgtgcacctgcagtcccagctattccggagactgaggtgggaggatcacttgagcccagggggtctgggccgcagcaagctgtgatcgcaccactgcacagcacctgggccatggaatgagatcctgtcccccaagaaaaaataatcttgttgtttatctgaaattcaaatgtaactaggcatcctgcattttatctggcaaccctacagctagagaggctgttgtcaccacacaataggaattctcccatcagaccctggccctttggcttcagcctcaattccaactaacatgcagatgcttgtggaaggaaggagtgggccagttagttcctatcagccctcagcctcccaactgggagaaagcctgccaggaagatgggagaggagggagatactcagggtacagtgtggagatggggtggggagcaaatgttctcatgtggaatgttccctgagctgccaagggagaaaggggcagaccaactccctcccgcttctgttcctccagagaccctcctgggtcctccgccaagcttggcaggatgctctatgtggcagcaatggggcaccaccaggtctccagagacgcgggtgggcaggtctgagttgaatgcgctgggtagagcgccctgggtgttgaagtgggtctctggcgccccctggtggtgaagggggatctgagtggttgcccggccccaacctgacccgttagatgaactggaccggagcttcacgagtcagatgttgtcatcacagccaccccctcacggcgacctgggcgccccgcagaaccccaatgctaaggccgctgggtccaggaagatccatttcaactggctgcccccttctggcaagccaatggggtacagggtaaggcggggggctgagggtcacgacaggtggatgggcggtctggcaccagcactcacagaagaggtgggccgtccaaggccagggccccctgagagagagcagacagtggaacctagcacaggtggtcagagggaaacccggtctgtgctgggaaagagggaagacccattcctgagtttatcagacatttgccctccttcctagaatggggccccctcccacccccgcatgggagatacccccacctgctctgccctagtcctgacgtgtgcacatggcagatctctcagcccctccctcgggcctcatctgtgcaaagaggacagtaagggcagaggtcagaggagggacaggcagcttgggtgcctgctgctccctgctgaccaggacccctgtccctgggggtaggtaaagtactggattcagggtgactccgaatccgaagcccacctgctcgacagcaaggtgccctcagtggagctcaccaacctgtacccgtattgcgactatgagatgaaggtgtgcgcctacggggctcagggcgagggaccctacagctccctggtgtcctgccgcacccaccaggaaggtgaggcctcgccatgtctgtccatttgtcccctggctgccctgatgccagcatgcccagacctccctccctctgccactgacagcactcttcctgtattccccgctccctagtgcccagcgagccagggcgtctggccttcaatgtcgtctcctccacggtgacccagctgagctgggctgagccggctgagaccaacggtgagatcacagcctacgaggtctgctatggcctggtcaacgatgacaaccgtaagaaccagatccttctttcctgcccacagggagaacagccatggaaggggaggggacaaagctggagggagctcttggtcactccctggacctgctgtgcagggcactcgaggccttcatcctggtcagcggataagcctgaggcatctttagggttttggccagatttgggctgggttgcattctaagaccaaacccagaaggttgcagggtgggtggttacctatgtggagtgaggtcacaggcccaggggtacccctccccatgcaggtaaccagggagctcacacgtgcatggttttcttagggtgagaggaaagttaccggatttagcaaacagaaatacaggaggttctgaatttcagatagcactttaaaagattattttgtacattgagaggccgaggcaggtggactgcttgaggtcaggagttcaagaccagcctggctaacatggtgaaaccgtttctactaaaaattagacaggcatggtggctcatgcctgtagtcccagctagtcaggaggctgaggcaggagaatcacttgaacccagaaggcgcaggttgcagtgaaccgagatcgtgttaccgcactccagacagggtgacagagccagactccgtctaaaaataaataaataaaaaggattattttatacattattttatctagcagcccgagatcagaggtgcctagcagaacagttatttctccagtcctggaagggaggcagggtgggcaacccctatgcgtgcccttgccttgtgtggaggcaccgtggatatatgggtagaggtgacatcgaggccaacttgagtccagccctggctctgccacttactcagcagagtcccttggaggactggtgacatatgtccacgccagtcatgctgacgctcagggctccgcaggcggcaattcagcagtggctggctttgccttgcttccccagcccctgggtgccatccaggggatgcacggccgtcctgctgtgtcaggggtggtgttgggaccaggctgggacctgggtgaccctctgaagcactctctctgccccaggacctattgggcccatgaagaaagtgctggttgacaaccctaagaaccggatgctgcttattgagaaccttcgggagtcccagccctaccgctacacggtgaaggcgcgcaacggggccggctgggggcctgagcgggaggccatcatcaacctggccacccagcccaagaggcccatgtccagtgagtggtgggcagggaggtgaggggcagaccgggcaggggggcagggggcagcagccagggccctggctcactcccctgccctgcagtccccatcatccctgacatccctatcgtggacgcccagagcggggaggactacgacagcttccttatgtacagcgatgacgttctacgctctccatcgggcagccagaggcccagcgtctccgatgacactggtgagtggagacctgggacccacaagaggacagtgggggtcttgggtacagagtgagtccactgggtccagagagggcaaaggggccagcaactagaggacatggaggttaaggcagccttggacaaatgcaatggagtgcacatctgtgcatggggcacaggaaccagtgcctgggggacagacacacacagccttgtgcaagcgcacatgagttcatgcccacgggaccacgaagaaacacagcttcacaagttgaaggttcaccagctgtgccatgcacacaggacactcaggccaccccccaggggcaggcctggcccaggagccctgggcagccaccaggcggccacctggcaggggtaggggagccaaggagacaagaacacccccaacagctctgtccttcctccttgattcccagcacaaagtgctgcggagcccttagctgggcctcctgagtgctcagtgtcagctgtggctccacctgtgggacatcagatgaatcactcatcctttccatgcctcacttttctgctctgtataatgggataccaatcacacagtaccatgagtggaaaaacctctggggcacgtatatcttttgtattttcttctgtccctgccgatgcctcaagctgcccccggtgaacacatactggcccccacggggctcagcttgggcttaaggagccattttgaggggttcaggtggagcgcagctggtgtgactctggaaccccagctcagctgcttctaacactacctgcgaagcgctcggtggcttgcggaacggtccctgggaggcgggcaggggcaagattcctctctccattgtacaaacgggaaactgagtctcggagaggttaagtaaagcaagggagacctcacagctggtgacagagcccagacttcccccaggtttctggcgggtccgggggtctctcctccccagctgtgccgaggctgcactcgctcatctggaaaggcttcagccgcgcaagggtttcacctgccgcggccttcccgctccggccgtgcgcatctacccccgcccccaacacacaccccgggatcccgggagctggagacgggctcccctcgcagagcctacggccttcccccgcctggccctgctcggcccggcgccccccggcggtgccaacgcggcccttcgttgttcccaaggctgcggctggaagttcgagcccctgctgggggaggagctggacctgcggcgcgtcacgtggcggctgcccccggagctcatcccgcgcctgtcggccagcagcgggcgctcctccgacgccgaggcgccccacgggcccccggacgacggcggcgcgggcgggaagggcggcagcctgccccgcagtgcgacacccgggccccccggaggtgacaggctcacccgccgccccccgatccgcgcccacccagcctcactcgcgcctgagggcctggggtgggcgtctgcgctgcctcgggggccccagtttcagccaggcccgggccttggcggctgggagcacagctgctcagaggcagggcccagtgccaggggacgcgtgaggcaggcgcttgggcccttatggtgcctgcctggccagggggtgcaaattcagaagtctgcccgggaagcggaccctggcacccaagtagacccctcaggggcctcaaaggacaggagggaaggcttggggatctccccagggcagagctgactgcagacgcagcaaacccccgccactgccagggtcagcagtgctcacaccgatagagtggccggccagaggatatgggctgtggaagcctgggtggcccttgggctcctgcagggacagagggcctctgtccctagtggtttgagggaaactggttgtatttaagcaaaagccacccagagggtgggtgaccaggaatgtgcagggcccagcctgccccacggggcccgggtctggggcaggcctgaccaagggaccctgctctccccctgcagagcacctggtgaatggccggatggactttgccttcccgggcagcaccaactccctgcacaggatgaccacgaccagtgctgctgcctatggcacccacctgagcccacacgtgccccaccgcgtgctaagcacatcctccaccctcacacgggactacaactcactgacccgctcagaacactcacactcgaccacactgcccagggactactccaccctcacctccgtctcctcccacggtgagtgacctcagccaaccctgcctctcccactaacccttcctctcttccagctcctggagcctcgggcttctgtctgctgtccccaccgcccattctccaacatacacacacgcatgcacacatgcacgcacacacgtgcacacgcatgcacacatgtacacagacatgcatgcgcacacgtacacacatgcatgcacactccctgctcctctcactcttgttttgtcctgccctaggcctccctcccatctgggaacacgggaggagcaggcttccgctgtcctgggccctggggtcccggagtcgggctcagatgaaagggttccccccttccaggggcccacgagactctataatcctggctgggaggccagcagcgccctcctggggcccaggtagtacaggggtggccatcctgtctccacagctgtcctgctccatctgtcatccagccaccatagcagccgccagctgtgcccactgcttcccctccattccatccacaggacccccgcctgcccacaggcgctaaccacctgccctaccatcagtgctgatgcctaactctgcctctgccctcccagggggcggggctggggctggggcaggagaggggccaggccagctgagcagttgagggggtggggctggcagactcacggggctcactctcttttggcacaagcagggcctgcaccctgctggaggatgtgcggtaggtgctgggcagcctggacagggtgttgcagggtgagtgagttgtccagccagcggtcagtgtagacatgccagctgagggagggaggtcagggggcagcactgtgactcccactgagaccctagcccctgcatctctggctgactgcggcctcctgtccccagactctcgcctgactgctggtgtgcccgacacgcccacccgcctggtgttctctgccctggggcccacatctctcagagtgagctggcaggagccgcggtgcgagcggccgctgcagggctacagtgtggagtaccagctgctgaacggcggtgaggcatggtggctgccaggctgcggggtgcagccctgcaaggcctggccccagtgtgacacatagggtacctcagctgtgtcaggaacccacccaagtcccttgagcgctaaagcccccatccagcctgagagggtctcccaccccattctccaccccacttctttgcctcccctcttctgaggtctcacccacctccctgggcctctctcctggtcattctctgctaggttttgcctaacaaggcccctttgggctgggatcctagggcctctgctggcctgagatgcctttgggggaacaaggaagtggcacttccctgggcaggcacattcaaagcagcatgaccaggatgcaggatgttgcctaaacatgagtgggattacaggctccactcttgtatagtacacaatctgaacaaccagccataccatactgtacccaacctgtacccaaaccacagctagtcctgggtgggtgataactaggtctcgatggcagcttagggacgaggaggatcaggccaggggtgggagtaacactgcactactgtgtgcccccacctgatccccccaggtgagctgcatcggctcaacatccccaaccctgcccagacctcggtggtggtggaagacctcctgcccaaccactcctacgtgttccgcgtgcgggcccagagccaggaaggctggggccgagagcgtgagggtgtcatcaccattgaatcccaggtgcacccgcagagcccactgtgtcccctgccaggtgagttgcctcccccagccccagagctgcccccatcatgcccaccacccacccacaggctgatgctcttcctctactgcccccaggctccgccttcactttgagcactcccagtgccccaggcccgctggtgttcactgccctgagcccagactcgctgcagctgagctgggagcggccacggaggcccaatggggatatcgtcggctacctggtgacctgtgagatggcccaaggaggaggtgctgcccaccccgggggcaggagtggccaggggaggggtaaagagggggccgcagacgctgaaggcatcttccctgctcagggccagccaccgcattccgggtggatggagacagccccgagagccggctgaccgtgccgggcctcagcgagaacgtgccctacaagttcaaggtgcaggccaggaccactgagggcttcgggccagagcgcgagggcatcatcaccatagagtcccaggatggaggtaggcacctgtcctttccttcacccccacccctcctcgggccgtgcctccttctggcaccaccctctgactggcctatctgcccaccccaggacccttcccgcagctgggcagccgtgccgggctcttccagcacccgctgcaaagcgagtacagcagcatcaccaccacccacaccagcgccaccgagcccttcctagtgggtgagcactgagggctaggggatcccggctctcctgggacagggagctagcagagggagaagggcagaccccaagccaggtcatctaatgcctcctcctccacagatgggctgaccctgggggcccagcacctggaggcaggcggctccctcacccggcatgtgacccaggagtttgtgagccggacactgaccaccagcggaacccttagcacccacatggaccaacagttcttccaaacttgaccgcaccctgccccacccccgccacgtcccactaggcgtcctcccgactcctctcccggagcctcctcagctactccatccttgcacccctgggggcccagcccacccgcatgcacagagcaggggctaggtgtctcctgggaggcatgaagggggcaaggtccgtcctctgtgggcccaaacctatttgtaaccaaagagctgggagcagcacaaggacccagcctttgttctgcacttaataaatggttttgctactgctaggccctgccttgcccattcttctggggcctgagaggtgctcccctagggtaggggagcggttctgacatcccccattctctgacacccaagcatacacccacctctagaggaggcaggtaccacattggaggcacaagtttattgagcacccggatatggaagatggcaccgggcacagagccgtgggactggcctgcaggccccgcaccctcaccgtgtgctgtcctgggggtgcctcacaagcacagcaccttggctccatcggctgcttgagagaggtagaaggtggcagtcccgccgtagtgctcctgtaagaggcgggctgggggtgagtggcagggccccgggaagctgccgctcctgcccgcccaggccctggtgcccgcccacctggatgtgccgcatggcgtggggagcagcggaggcctccagcagtgtcaccgtgcagccaccgaagccaccgcccgtcatgcggctgccataaaccccaggcacagcaagcgcagcctccaccagctggtccagctctgggcagctcacctcatagtcgtctctgcagagaggatattgaaggggtgggcctgggccggcctgtgcccggcaggagcggggcgcccagagggcctcacctgagtgagcggtggctctccaccatgaggcggccaaaggctctgtagtcgccacgtctcagggcggccgctgcctgggccgtgcgccgaatctcccccaccacgtgccgggcccgccggaagccctctttgctcaccaggtccctggcagctggggaggaaagaggagtcagcagccgccttctcactgcctggggccccgacgcctgtgaggaccagcaggcggtgatggcagtggccctggctggacggtgaagggtggaaggccgcgggggcagggcagcctggctctctcagacgtgggtctgaagagcccctttatcacagtgcctcctcccccgactgtaaaatgggacaccttggtccttcagggagcagtgagggttgaaacactccatgctttccaaggtgagtgctgccctcaagaggccaccacagagcaggaggagaagaagttctgctgagccacatggagcctccagggctggggctccagaagagggggcagaagcagccagggaccagcaggctgtcccatctgactggagctgaggctggaggggtacctgggtcagtaccagtactgactcagtgtactgcgcccggccaaacccgcaggtttaagggggaaggttgttagggtaggtggcatggcgggatggaggggcaagtagattcaaaggactgagaaatgaatgggtgggcgcggtggctcacacctgtaatcccagcactttgggaagctgaggcaggcagattgcctgaggtcaggagctcgagaccagcctggccaacatggcgaaaccccgtctctactaaaaatacaaaagttagccgggcatcgtggcaggcgcctgtaatcgcagctactcaggaggctgaggcaggagaattgcttgaacctgggaggcggaggttgcagtgagtggagatcatgccactgcacttcagcctgggtgacagagtgaggctccctctcaaaaaaaaagaaagaaagaaagaaagaaatgaatggaaatgagacagtgggtggtgttttaggagggaagaaaactgagcatgtcttggaggctgagggaaggagccaggcagccaggcaggggatggaaggagagggattgcgcttctagggcaggactctggaggaggcagggtgagctgctcctatgcagaaggagacctggaggaggggcaaggacaggctggggtggggaggagggaccaacttgttccagtgtgaaaaccttggccaagggcatctgcacagagcaggcagggcaggtctgagcactgctctggagaacgtgacacagttcacaaaggaaaaggacagggaggtccctcggagctgtctagtgtccctgagataggcacacctacactgccaggaaggaacaactcagtgtgggcagcacggccagccagtcaagagcatgggccctggagctaatctgtccagatggggttcagatcccagcactgcctctcactgtagattcccccatcaaaaatatgacaactatggtagcagaatgtgctttacagagttttggagggaattaaatgagctaatattgataatgaccttaaaactgtccaatagactaccttcctggccatgtgtagcaggagccttaaggatacttgtatcttttttgttttggagacaggatctcactttgaggcccaggctggagtgccatggtgcaatcacagctcactgcagtctcaacctcctgggctcaattgatcctcccaccccagcctcctaagtagctaggactacaggcacacaccaccacacctggctaatttttgtatttctttagagatggggttttgccatgttgcccaggctggtctcgaattcctgagctcaatgaatctgcccaccttggcctcctaaagtgctgggattacaggcacagacgtgagccaccgcacccagcctacaatacttgtgtctcttgactctgtaatcctactcctaagaatccatttctaagaaactattaagagaatgcagataggccaggtgtagtggctcacgcctgtgcctgtaatcccagcactttgggaggccaaggcaggcggatcacttgaggtcaggagtccaagaccagcctggccaatatagtgaaacccagtgtccactaaaaatacaaaaaaaaaaaaaaattaactcgctctggtggcacacgcctgtagtcccagccactccagaggctgaggcaggagaattgcttgaaccctgaagacggaggttgcagtgagccgagatcacgccactgcgctccagcctgggctacagagcaagactcagtctcaaagaaaaaaaagagaatgcagataaaccgggtgcctttggttgcagctacccaggagactaggtgagaagattacttgagcccaagagttcaggtccagcctgggcaacttagcagaacccatctctttaaaaaataaaaaagatggccaggcacagtggttcatgcctgtcatcccagtactttgggaggctgaggtgggcagatcaccaggtcaggagttcacgaccagcccgaccaacatggtaaaacctcatctctactaaaaatacaaaaattagccaggtgtggtggcacatgcctctaatcctagctactcaggaggctgaggcaggagaatcacttgaacctgggaggcagaggttgcagtgagccgagatcgtgccactgcactgcagcctgggtgacagagcaagactctgtctcaaataaataaataaataaataataaaaaagataaataaaaaaagttaatcacagtgtgaggtgtatcagaaaatagttaagtaaatgacagagcacctgaatgctaaaatattgtggagctttaaagagccacacggaggccaggtgcagtggctcacacatgtaatcctagcacattgggaggctgaggcgggcagatcacgagatcaggagttcgagaccagcctggccaacatgaaaccccgtctctactaaaaatataaaaattggctgggcgtggtggtgggtgccagtaatcccagctactcaggaagctaaggcaggagaatcatttgaacccaggaggtggaggatgcagtgagccgagattgcgccactgcactccagcctgggcaacagggcaagcctccacctcaccaaaaaaaaaagaaaaaaaaaaaaaaagagccacaccgagatatgcctttcatggcataagataagatagggttctgggttctgagattatgtttagtttaaaaaaaaaaaaaaaagagaccggcactatggctcacgcctgtaatcccagcactttggaaggctgaggcgggaggatcacctgaggtcaggcgtttgagaccagcctggccaacatggtgaaaccccagtctctactagaactataaaaaatgtgccaggcgtagtggcgggcgcctgtagtcccagctactcgggaggctgaggcaggagaatcacttgaacccgggaggcagaggttacagtgagctgagatcgcaccattgcactccagcatgggtgacaagaccgaaactctgtgtccaaaaaaaaaacacggcaaatgggctgggcgcagtggctcatgcctataatcccaacactttgggaggccaaggcaggaggaccacttgaggccagagttcaggatcagcctgggcaacactgcaagaccgtctttacaaagataaaaattagccgggcatggtggcacacctgtaatctcagctacttggaaggctgagctgggaggatcccttgagctcaagagttcaagtttgcagtaagctatgatcacaccactacactccagcttgggcaacagaatgagaccctgcctcttaaaaaaaagggggtggggggggaaagtgatgatatattacatatactcagctttgaagacagatgtggaaaaatactgaaaggaaacgtgaaaatgtcagcagtggctatctctgggtagtggccttatagcttattattttctactttgtacttttctacattttccacaatggaaacatgatttttctgattagataagaccattttaggatttcaagcagccctgctgagattggaaccctgggtgcgcagtgtttgaagggactggggagagcatggcagaaggccctggagatcggggtcccaggcagggtcaaggccacactgaggcgccagcagggagcacagccgcctccaggatagagcaccctggcagttctcaccctctagctcttccagttgtacctcccggaggctttccttgcccagcgcccgggccacttcttcacattggcgccgccgcacagggtactcgctggaggccagggagtggcggacattagagttggtgatgagcacggccagcttggggtccgagagtggcaccaggctggtctccaaggacctggggtggagttacaatgggggagatgacgaggccaagcgtgtgcttgctgcgccaggcagtgggcacactcccacccaggagctgctgagtgcagggcgggaggggacgaggggagcgagcccaacctgcagtcaatgagcagcgcgtggcctttctgtcccataagtgagatgaactggtccatgatgccacagggcatccctgcgaagctgtgctcggcctgctgacacacctgggcgcgggcagctattgtgcccgagtctgcagtacagggtgaggtggggaggctagggctggtggaagcagcagtggcttcaatgacactccagggagagtccctgccaccccctccataaggcatagtagaagctgggaccacctggagacctcagggaaggagggctgggtcagggctggggcctagctggtacctggacagagctgctggaggaaggtgtacgtggccacttccaaggatgctgagctggacaggccaccccccaggggcactgagctgaccaccactgcactgaagccagggaggggggcagctgcaggggaaagaacaggtgatggtaagaggggctgcctgggaggatggcacaggaagggcaggtgtcctggcgggaagggcagcaacggcctagcagctgtttctagggtgtgtgtctcaattgtcagaagccaccaacctgctgggccaagggacccactgccctccattttcccaccctctgaggttgctgggacacttctaattgtcctcctggtttagggctctggagggaaaaaaggctggggttcaaatcctggctcctccaatcaggtcacgggaaacccagggcaagttcccgaccttctgggggcatcagtttcctcatctgtacaatgggatgctccactctacaagccttccccacagtgtatcagacaaatgaatgggctctgtggctgtgaggtggcactcctagtatcagtgaggacttggctcaggcctgggccccatacctgggtagtactgaatcactcccttgacatagttggcccaccgaggagtcccaggctccagcgagcgctgggctgtgggcagtggaaactgcagccgctggggctcatcggcaccctcagaggtggtgaggagagacaccagcccatccttgcgggggctgcccaccagcaccgtcatgagctccagagcctggcaggagagacaagcagtacgtgaggcttccgccagctggagtaagcctctccaatgacactgcctccagccgaggttctgatgcctccacagtcatcaggttctgaacctccaggttcagcgtcgcagggaagatcctgagggccagctgaccttgggggcttgagccctgcccccttaggtcttcaggggcggggcggctgcagctggagcacagacctggactctgccctgagctgtggggcaagggggagagctagcccaaagggaaaacagatcactggagctccaaagcctttacattttggggtggctctggacatcctgtacctgtgcactccccaagctgcagatggggcggaaagcgccccccgctgaaagctgggagtcctcactcccaagtcgcagccccgccaagaacctgctgtgtgacctccagcagttcactgggcctctctaggcctcagtttcctcctctgtaaattgaacgggctgggccagaaggctacgttcgcccaggtctgcggttggggccccacggtggccggaggcgcggagtgtccccttctgcgtggcacacagggcctcacagtttaaggggaacatgctcccaggttgaaggcgaggagccccagcccccagagggcgggcttgagccaagaggcggccgcgcaccctctcccggccacttcctcgcttcctcccttccaacgtggggaacagcctgtcccggggactcttccgtgcaccggtgctccaggcgcagctgcccgccccacatctcccgcgggaagaactcgcccccagcgtccccgaggcccgccctcctcggcggccgggacaggcggcggcgggctaggggctccccgtgcagcccctcaccataggcagcaccaggccctggttgtagtccgtgtgttccccgatgaggttgacgcggcccggcgctgacacggccagctcgggctcggccccgaactcctcccggaaggctcgccgggcctcggccagcagctccgcgacctggggctgtctcaaagcagccatgacgcgcgcctgcagctctgcacagctgctccggcacagccccgtcggcgcgggatgctcgggcggggccccgcgcgggggtgcgcacattcccgccagccccgccccgcgcccggacgccccgcccccagacctcagccggttccgcccccacccgcaactcccgtgggaatccagctgctgggtggtgggtggcaggggctaatggtgccgggtgggatacagcgcccccgatggtgtccttccctctggacttcgggaagaaccaatgagcactcactagagtgagaatagccctgagtggcacttggcatgaccaggatttctgagctgcccttccctggcgctggtgactttctatgtgcctcaccacccaccaccacccacacagccagagcaatggagctggcacccggttgacctgggattcccaaagggatcccctaggtccccagggccagcagctgtgagaggtcatcagcctctgatcaccggtctccaagagggtgacct[141 bp omitted]agaaaccccatctctactaaaaaatacaaaattagctgggcatggtggctcatgcctgtaatcccagctactcgggaggctgaggcaggagaatcacttgaacctgggaggcggaggtttcggtgagctgagatcacaccattgcactccagcctgggcaacaagagcaaaactctgtctcaaaaaaaaaaaagacaagtttggtggtgaccagagagtcaattttacaagctccttttctaggtaatacgcaacagctcctagcaatggagaattggactagggtggcggtggccagcagtgggcccagcccctcccttaaggacctgccacagctgtccaggtaggttgtgctgttggccccagcaggcactacttcagcccagaagcccttgtctcagaggcgtggccttgttcccagtcaggcactcttctcttgctatcctgcatcctaaacctgctggccggccccaactgctgccttgatacctgtccacagctgcccaccctacatggaaccttgaaactgaaagactgaaatgtaagcagcttgcttggggttagggtgggagtagtgtggggagttatggccagggatttagcttggggcctgctcaggggtgtgcccaaagagtggggaactgcattccaagggcaattctgaaaactcttagaagaaaacataggggtacagttttgtgacattggttaggaaatgtttatttggtttctgtttttgagacggagtttcgctctcgttgtccaagctggagtgcaatggcgtgatctcagcttactgcaacctctgcctcccgggttcaagcgattctcctgcctcagcctccggagtagctgggattacaggcacgtgccaccatgcccggctaattttttgtatttttagtggagactggggtttcaccaggttagccaggctggtctcaaactcctgacctcaggtgatccacccaccttggcctcccaaagtgctgggattacaggcgttagccaccacacctagtcatgtttttttatttttatttatttacgtatttatttattttagacagatcttgctctgttacccaggctggagtgcagtggcgcgatcttggctcactgcaacctccgcctcccaggttcaagcgattctcctgcctcagcctccccagtaactgggattacaggcaccctccaccatgcctggataatttttgtaaaagcagggtttcaccatgttggccaggctgctcttgaactcctgacctcaagtgatttgcctgcctcagcctcccaaagtgctgggatacaggtgtgagccaatgcggccaggcaatggttttttagatatgacatcaaaagcacaagtgacaacagaaaaataaactgtacttcatcaaagtgaaatatttttctgcaacaaagaactgtcacgcgtgtccgtgtgaacagaccaccaaacaggctttgtgtgagcaacaaggctgtttatttcacctgggtgcaggcgggctgagtctgaaaagagtaagcaaagggtggtgggattatcattagttcttataggttttgggataggtggtggagttaggagcaatgttttgcgggcagggatggatctcacaaagtacattctcaagggtggggagaattacaaagaaccttcttaagggtgggggagattacaaagtacattgatcagttaggttggggcaggaacaaatcacagtggtggaatgtcatcagttaaggctattttcacttcttttgtggatattcagttgcttcaggccatctggatgtatacgtgcaggtcacgggggctatgatggcttagcttgggctcagaggcctgacaagaacattgtcaagaaagtgaaaagacaactcacagaatggaagaaagtacttgcaaatcatgtatatctcaggggcttggagtttgagaccaacttgggcaacgtgggaagacctcactgctacaaaaaaaaaaaaaaaaattagccaggttgggtggcacacacctgtggtcccagctactcagaaggtgagagaccctgtgtcaaagaagaaaaaaaaaaagcaaaagatttcaagagacatttttccaaataatataaatacaaatggccaataagcacatgaaaagatgctcaaatgtcagatgtggtggttcatgcctgtgatcccagactttgggagaccgaggtaggcggatcacttgagagcaggagttcaagaccagaccagcctggccaacatggtgaaaccccatctctactgaaaacacaaaaattagccaggcatggtggcgcacatgtgtaatgccagcttactcgggaggctgagacacaagaatcacttgaacccggggggtggagtttgcagtgaaccgagatctcgtcactgcactccagcctaggtgacatagtgagacttggtctcgggaaaaaaaaacaagtgatgtatctatacaatagaaatattaatccataaaaagaaatgaagtactgatacgtgtaacaacatggatggagccttcaagaaaaaaattagctgggcgtggtggcgggcacctgtagtcccagctactcgggaggctgaggcaggagaatggcgtgaacctgggaggcggagcttgcagtgagcagagatcgtgccactgcactccagcccaggtgacagcgcaaaactccgtctcaaaaaaaaaaaaaaaagaatgaactttgaaaatattatggtgagtgaaggaagccagtcacacaagaccacctgttgtatatccagaatcggcaaatctctacagatggaaagttaattagcggttgcttaggcctgagggaatagcagggtcagagccaaaggatggcaggtttctctgtggtaaggaaaatgttctaaaatggactgtggtgatggttgcacatgcctgtgaatatcctaaactgttgaattttatgttttaaatgggtgaattatatggtatgtattatatctcaataaagctgttaagaaaagaatggggcccaggtgtggtggctcacgcctgtaatcccaacactgggaggctgaggtgggcaaatcgcttgagaccaggagttcaagaccagcctgggcaacaaagggagac[141 bp omitted]tttactaaaaaatagaaaaattagcccggtgtggtggtacaagcctgtaatcccagctactcaggagactgaggcaggagaatcgcttgaacccagggggcggaggttgcggtgagccgagatcacaccactgcattccagcctggacaacagactgagactccgtctcaaaaaaaaaaaaaaaatcaaaaattagtcaggcttggtggtgtgtgcctgtggtcccgactacttgggaggctgaggcaggaggatcacctgagcccagaggttgaaggtgcagtgagccgagatcacgccactgcactccagcccaagcaattccagatgtcatcggatgacctgctccttttgagcacacttcagtaaagcattttttggcacagccaacaccaaacaaatcataccatgagtggcccttgggctggttgaaatggaatgaaactcacaaaccatacctccctacaagggcccattctatcagggcagaggtgagcgaagcagccccttctctgcatgccttttactcacctcacctctgacacccaacagtgctgagccctcatctccactcttcctattatatgatctcaggtaaatgaagtgacctttctgggcctcagtttcttatgtgtaaaatggggctagagattgctcccagacatgctgttgtaaaaggaactgaatgagatcatcttcataaagtgcccagcccagcagctggcacttggtacgcacagaataaatgtttgctattcttatcagttgtccattaattcaacaggcattatggtactctcctatatgcaattggccagaaagataaatgcctcaggctctcacggtctgattgggaggcagacagtcacaaatctgaccccctctgtctgcgataaatgttgagtagagctttctgaataggagaagagagagcagggattctgaccagttagaagtccacacccttatctttatttccattgattcattttaattgacaacgtgacttttttttttttttttgagatggagtctcgctctgtcgccaggctggagtgtagtggcacaatctcagctcactgcaacctctgcctaccaggttcaagcaattctcctgcttcagcctcccaagtagctgggattacaggcacgtgccactatgcccagctaattttttgaatttttagtagggacagggtttcaccgtgttggccaggctggtctcacactcctgacctcaggtgatccgtctgccttggcctcccaaagtgctaggattataggcgtgagccacctcagctggccaacatgaccatttgacccatcttcatcctttgtgttgttttagtttttctttttttttctttttttttttttttttgcgagacagagtctctctcagtcacccaggctggagtgcaatggcgtgatctcagctcactgcaacctccaccttctgggcttaagcgaatctcctgcctcagcctcccaagtagctaggactacaggtatgagccaccacgcctggctaattttttttgtatttttagtagagatgggttttgctctgttggccaggcaggtctcaaactcctgacatcaagtgatccgcccacctcggcctcccaaagtgctgggcttacaggcgtgagtaccacacccagcctgttttagtttttcttggagaacctcgatttaggctgggcaaggtggctcatgcctgtaatcccagcactttcagaggctgagatgggcggatcacctgaggtcaggaatttgagaccagcctggttaacatggtgaaaccccatctctactaaaagtacaaaattagcctggtgtggtggcgcatgcctgtaatcccagctactctggaggctgaggcaggagaatcgcttgaaccccagaggcagaggttgcagtgagctgagattgtgccgctgcactccaacctgggcaacagggagactccacctcaaaataaataaataaataaaaatacaaaattagtctgggcgcagtggctcacacttgtaatgccagcactttgggaggccaaggcaggtggatcacctgaggtcaggagttcgagaccagcctgaccaacatggtgaaactccatctctactaaaaatacaaaaaataggccaggcatggtggcgtgcgcctgtaatctcagctactcaggagaacgaggcagaacaatcacttgaatctgggaggcagaggttgcagtgagccgagatggcaccactgcactccagcctgggctgcagagtgaaacttcgtctcaaaaaagaaaaaaaagttggcataaggcgaagcatgtccgtttgttcaagatggactctgaaacattgattttatttgggaaatgtgtttactgtcttttttgaatcccatctagtgtgttactgaaatttgttcagagtgaagtctcctttgacctttgaccctccccccatttcctggccagatgtctcaggattagcggggaggtggcatggtaatggaaacacttcaccctgagctttgtcctctgctatgctggctgagaaacttgcttgtatcttgctgattatcacgtagggctgaggcgtctggagagaattctgggttatatccaccactgggacatactagccagtggtgggaataccatgcgtgccagccaggtgtctggtgacctagacaggcttagaggtgggtttttttgttttttgtttttttttcagtcagggtcttgctgtgtcacccaggctggcgtgcagtgtcaccatcacagcccactgaagccttcaactcctgagctgaagcaatcctcccatctcagcctcccaagttgctgagattacatgggaaagccactgcacctggctctaacaatgtttgtctaggccgcggaaagatgtgacctaccactgaggacaggcactccaaaatgcctcttctccacgggagtccgtgtctgtcttctacacaaaaaccaaatccttgggccctccttgctcaacttggcctttgtttatgtttcacgggacgatacacttgacgcagccctggcttctatgttgcagtcacagcctgattccctgatggacttaggtccgtggctcccggtgttttcagagactgacatcttgctcccagcagatggctcactaccttacccattctgggagattccttttattgtttcttctagagggttaacctatttcctgatctgggctccctttgcccttctataatattcatgataacagtgtctggaatattgataataatattgagcccatggtcagcccagacctcagggctgatatctcaccaagatgcacctgcggggcagcacagcttgtttactaccagcgtctttttttttttttttttttttgaaatggagtctcactctgttgcccaggctggagtgcagtggcgtgatctcggctcacttcaacctccgcctcccgggttcaagcgattctcctctctcagcctcccgagtagctgggataacaggcatgcaccaccacacctggctaatttttgtgtttttagtagagatggggttttgccatgctggccagcctggtctcaaactcctggcctcaagtgatccacccgcctcagcctcccaaaatgttgggattacaggcatgcgccacctctcctggcccctgagcccattttctcagccactactgtttcctggactgctgcagcctctgctctactggcctctgcttacgaaagtgtcaagagttaaagctcagcctcttggtgatggacaggaggggcagctgctctctcagactcagttcctatgtgaaacactctcggtttggaagccaggccagtaaccaaagcttttgggaaccagactgattctttgccacccatgctgggagcagatccagccagctgtgcttgggggctgctggggccatttggtttggtcagcagtcactcctggaacttctgctatgtgtcaggtgtgattccaggggcagacacactcattccctgccttcggagcgccaggagcttctcgtctccctgcggtctcagatgcccctgctcagataacccagctgcaagtcttgtctttatttgctgcccctactctgtccctgaagttcctgccctctaggttgacaaccaccctgctgctggccaaggagcatgtccagacctacaagatgcagctgacagctcagggccgaggctgtctcatcttgcgcctcacactggctggaaagctgctggcactgcagctgcccaggcctcagaccgctggtggtgggcagatggattgagactagctgcaggtgcggagctggggagggagagccctgtgagggccgtgatgcctgggctgtggacccaagcccctcctgacccctctgcttggccccctggctcagtgcctggcagagaggagcttatggggaaaaatgtggccaacgtaggaggtggtacgtgaatagggatttaacggagcccaggttccacctccatgaggacaggcacaatccctcacacacccctcagcaaaggccacctgccctaagcctgcagcccatctccctctccttccctggagccctcttgtccctggtactggtgacgtctgagatgaacttctccctttctgcccaccctccatcccactgtgtgtatccccagaactgcagcttcctgatgagagctcgcagctgccagcgagaaggccccagaccctggctgcctcaccacgtccctctctctgcacccttttccagatcacgcatggccttaccgcccctccaggagctacagccccactgaagcccccacttcttgcttttccagtggggggtgactgtagggcctcttagctttctccatgggggacgggtcatgaggtaggaggtgggctgggctcgagtggagagacctctgctcgggagacggctaagaagcgctgctcccaggtgtgcttgacctgcaagattggcccctgctggccaccgggcatagtgctcaggtgaagacaccagaacatggtggggcgcatcccagagaaatcctgtgactctgcttggagggagacagtgtctggtgggatcactgatagccagggattgctgggccgtcagcaggaccacagggagtaggagtccccaaggggaggataatattctccagccccttctcacaccacagcccctcgcaatagaggccttgtgcaaactcctctgtgcgtaaacacagggctgtctcagctgcacccacctcggcctgcagcctccctcattccccagacctgctgacaaagggatcagggagggaaaaggccagccacccggcccaagaagagggcatccttagtcttctgagggtactgtagaatttgggttggcaacccaacaggggcctaccccttctccccttcttctagccttaccttggaggaggatgctggaaggccagctttcatgcagcagttgctggtcagaagcaggcccagcttgataagagtggtccaggctggtgacatccttgtgatcagggcatctccctgagaaatgcccacaggggcaggcaggagcaccataggggtgagggaaggaagaggctgtgagggcccgggcaaggtgcagccagcttagcctcaatgggactgatcagtgcctggggtggggctgagagaggtggactgcgattcctttggcaagatgattaaaatgctcctgctccaagggatgaggagagaatgtccaggataggggctcaaagaactcgtgcccagtggaccacagcaccccctgtaagacaactgcagaaggggtgaaaactacccacctggcacttctctatggcgggctagactggccataggcctcagtctctgaatctgaacacaggctggggccatcttgcagaaaccatagggcaagcccttgtttcctgctgattgaattgcagacagctgaccgtgttccgcagtgttcctccctctactgacctacctgaaggtgattcaggagaaagggattgctttcccagggctgcaagaccccaccctgacacctgacaccagacagtgcttgcaaggagccaggcagggggagctgagcagcagacaccactgttggggaatcatccagtgaatcgatgagttggaaactgttaatttccagtccaggcagtcagctcagggcctcttctccttccctttggctgatggtccctaggccaggaccagtggaccaggtgctaaaagtatccaaggtcctgacaggactctggctcccagaaattctgaaacccaagccactccacttgtcctgaagcccttagcctgtgtcctcaagaaggtggctggaagaccacttgttcatgatgaagttgcaggtcaggagctgggtccactcttagtgagggaacacccgttgcccttcatttctcccgtcttcctcttcacccttccttttccttattctgcagttacactgtggacccctggttctgggtaaaacaaccctgcttcatctcaaaactgactgctatgtggatcagatgattgaagtttaagggacaaattatgtcccgttttcagattgaaggtggtataattagaatattggtgggtaagcaatttgaccttattttcctgagacatgtccctatacaaataagtcactgggtccccacctcacatcaccatggtatgggtaggtagaacgaccgcataatttgccaaattgggacagagaacagtaaacacaggcactattaaatacacttcaagcctgtaatcctagcactttgggagctcgagtttgagaccaacctgggcaacatatgg[210 bp omitted]gaggcaggagaatcactggaacctgagaggcgggggttgcagtgagccaagatcgcgccactgtactccagcctggtgacagagcaagactccgtctcaaaataaataaatacaccacttcagcaggcacagactggcactgtcctgggccaactgtcactgaggtcacctcaatagggagcttccttattattgaatgcgcacgtcccagccccagatgaatcagaagtcagtgctttttggacattgccccaaactttttgaaagacattatcatttgaatgaaaaccattgagaaatgagaaaatcttaacttcaaaaattttattttagtctcatccatcaagggcataggatacctgcatcagctgcaacttctgcttttctcctttgcctctgctcctttacccttaccgagggatatcccatacaggaagccgcctacaaccaaaagctatcttcgccttctgggttgagtgctcaagccaagtgtggaaatgcaagtcactgcttcggcagattgcaagctgcccaatataatctaagagccttctatgccagcctgcagactggagaaggttcactagtgtcacccacttgggttgtcacaggtagtaagcagaagctaactcatcaccgtagccaggtttgtgtactttgtttccagacacgctacagcatagcacgttccaacatctgatcttaatctcattctgaagcacagtgaggaatcaagtgtgcttgttccagagctgattatgaactttctagaaaagcgggtcattatattgcatcctttcataggagctcattatcacgacctgaaagatacctactttaccttccctccaaaatatcacatttgaaactaacccaaacttttgagaaagcaattttaatggggtataactttaagcagttgctaacttcaaacgtggaacgctttgatgactgctggctctcatgctgtctcactgacatccacgtactatgctttagtggccatcatcgcacaaggaaactggtttcatactgaagtttaagactgagttctacacctgtgggcttctacactacggaacgggagtgggggggctgaaaagcttattaatatactttgtcttagcccacactgcaaatacagcactattatggcatcttaatcaagcagagagctgttcacatgctttctacagtatctttataaataaaaggttcctttatccaccaaacaacacctgaaatgatctaagttcaaaacattagtatacaaggacctagataatgggacatgtgaaaacttagtacattcaatttaggttttggacacttagttggataaacaagtttatttgtaaatttagtcaacatacataattgacctaaaaacttcagtaaattttaaaaccacttggaaggccatctctataaaaatgattttcccaggacagtaaccagatgtaacctaacccaacaccatcttaattggcagaggttcagtgggctggagttttgtgctcctcccccacaccaagtttttataatacaaatgccacaagaaaaagaacttcggtactgtttcctcagcagaggagaaaaactcaacctagttatgagaccaaccacacaacacaatgaaaagctgcactaactagttcagaatgttagttaagatgatgctggtgtgaataactcgttttttctagagcccttataaataaaatcccccagttagtgtttgcattatcagctagagggttaacatgtggtagaatgaggacttatgcaaggtataaatgcgcatagcattttactactatgagaacaagtgcagtcagaagaaaaccaactggactctaaattacacacaccttaatgacaagactccccaccacttgtgaatgtaaaacatttaatttaaaaatgttgatactacaatatataaaatagctattataaatgcacatagtgtattctatagctgccaggtttactttttttttttttaaaggaaactgtaagttacactgtggttaagacttgtatcttcacccttgaaaaagcccacattctatcacagtgatgtatggtcagacttaacagccccaattgttaaacacttggatcaagtcataaccagttttattgcaaaaggaccctgtacacatttatcaactctagtaccttaatagctacccaacaagtcattaacatacagaaacatgcatcatgagaagcaagaagtatcacccatcccttctgcatattagcaacttgtcactcctgagcaacagtgctcacatcactgaggtctgtgaacagtcacttttcgcattcatcctgagtgaaagatggaatgacttaagtacaaatgcaacatattataaacaatttcttacaaaaaaagtcacaaattaaaccaaagtattttacagaatttactacaaaacgccataaaaactgccttcacttaagctctctctccccgtatccggcgagccaactggatgtctttgggcatgatggtgactctcttagcgtggatggcacacaggttggtatcttcgaacagacccaccaggtacgcttcgctagcctcctgttgaggacgagagccgcactattaatcccactcggggagcggaaaccgcccagccctcccccggctccaggcctttgtcttacctgcagcgcaccgatggctgcgctctgaaacctcaggtcggttttgaaatcctgcgcgatctccctcaccaacctctggaagggcagcttccggatgagcagctcggtcgacttctgataacgacgaatctctcgaagcgccacggtcccgggcctgcagcgagcaggggaggagtgagcggacgctgccgcacaaagccggccaccgccgggccattgttcccccgcccgacctacctgtagcgatgaggcttcttcaccccgccggtagagggagcgcttttcctggcggctttcgtggccagctgtttgcggggggctttcccaccggtggacttacgagcagtctgcttggttcgggccattttctttcacctaagaaagacgccccgaagataaggccgccgcgctcacccgggccgccccccagggctgcggggggaggaacagatcctggccccaccgccgggcctcccgcctccccgcgccccacctcgcggcagcagatggccgagggccgccaacctcctccccctcccctaatgactcaggctgcgaggagcggcagcctcccccgggagggggagcgcggggaggagtcacttcccttcctcgacgggcggaggcccgactgcccggaacccggcgtcgggacctctgaatcaccgccgggaaaaggcggggacacagttccggaacaaagccccaaggggaaacctcccggccccatacccgacccgacgccagcggcccgagcagcccccgccgctcggctcccaacggccgcggcgcgcggcgccaacggttggcagaacctgaagccgcgggtaaacctacgaacgcctacccaacgccgaagttttaggccacttctccgaccgccgcgccgcttccgctgcccgaggaagagccgcagtcgacgagcgaaaaaccagcaccgcccaacgaacgaccaaaccgctctgcgctccaagcccccgcgtcgcctccgtttttataggcacgcttcacgctgcgtctctgcgtcatagaacccttatttgcatacaccaacgactttttctattggtgggcgctttcgccgacgcgctgacatcccccgacacaaaggccgtgcttcggcactgttccatgattggtgcatatctacgccgctgattggctgttaaagtggcctaatgattggatggatgcaaagaggaatggacgaatcagagtttagcactaagcggcccttctgattggataaaatggagctatgtttggatccttcccttggttccaaagctctgcaatagaaagtcaatgcaaatgaattgcattggtctctatcagaatgagcaggagtctaaactcacaggcatcaagcgaatgctatgcacccagagaggctactttaacaaaatttttgtaaatattttccgatgtaaaataaaatgtgttccctggattatttacctttcataatattttgatagttaagtgcgtagtgtgagaattagaattcagtaaatcatgttatattatcaagtatttcatatatcatgcacatacatttttaacaaaaagcaggtctcttggtggggtgggaaggggtaaataataaatacaaataaacatgttaataaattattttagaggaactgttttgtatgtttttaaggtgtcacaaaatattttttgatttccatatgcttaaacaagaggtaacttactaagcaacatgttacttgaattatgtacttcaagtgaatgaaatgactacagctagaaagtaaatagtcctactatagtatttgcatgtccataaagaataaacaaaagataactaaactagatatgtgcccttttgtttaatagcatatcctggcaggtattacttctgaagaaacatgacaaatgtgtaaatatgctaatccctacctttgcctaagtaaatgtcttgggtagattgtaatagtcagttcttcagttgcctcaagtatataaaataccatagcaggcttaaggttaagactagccaagcaaagcccagaaaattgaaatagagccttgggcattctactctatagttctgatgctggtccagcaaatattctaaactattaaaagaaaaagtagcagatacaggtatgcataggtttcaactaaattaatttttttttttgagacggagtctgactctgtcgcccaggctggtgtgcagtggcacgatctcagctcactgcaagctccgcctcctgggttcacaccattctcctgact[135 bp omitted]ggcctcccaaagtgctgggattacaggcatgggccaccgcccctggccggtaattttttttttttttgaagtggggtcttgcccagtcacccatgctagagtgcagtggtgcagtgaccacggctcactgcagttttgacctcctggactcaagcaatccttctgccccagcctcccaaagtgctaggattacaggcatgagccaccatgcctgaccttcagagaattacagtacgtaagtacaaatacctcaatattgacttgtcacaccagtggtcaagtatcaaacaatgagaaaaaaatgcacactttgaaaaactagctcagcttcatctcaatctctggtatcaaattcctgttattatttcagccttcttaatttttttttttttttttttgagacggactcttgctctgctgccaggctggagtgcagtggcgcgatctcagctccatgcaacctccacttcctgggttcaagcgattcccctgcctcagcctcccaagtagctgggattgtaggcatgcgccaccatgcccggctaattttttgtattttagtagagacagggtttcccat[139 bp omitted]atatacctaaatttactgtgataaccaactttgatttctgcctttgactcaaaatttgaggtagggaaaaattacatgattttattaatgccatgctgagaagagaaacctaggtggattctcatgctttattctcaaacctgtgtcaagttaagaaacaggggactgtttagacacacatatgaggctgtcaaattctctgggatgcaaacagaaaaataacttgtcatcttttttttttttttttttttgactttggcctagaagaggaataggctttctaaattggtcccccactttgtgttccacgatttttttttttttttttttttttgagatggagtcttgctctgtcgcctagactggagtgcagtggcgccatctcggctcactgcaagctccgcctcccaggttcacaccattctcctgcctcagcctcctgagtagctgggactacaggcgcccgccaccacgcctggctaatttttttgtatttttagtagagacaagggttt[132 bp omitted]atcctgtcatttccatgcctttgtgtggatggacagtcattttctttccagctttgctgattattagaaactaaagccacccggagaaaaaaggtatggatatacatttatccatttaagtatgattcgtggaaacaggagtccgggcgcagtggctcacgcctgtaatcccagctcttgggaggctgaggagggtggatcgtgaggtcaggagttcgagaccagcctgaccaacatggtgaaaccacgtctctactaaaactacaaaaatcaggtgggcgtggtggcacacacctgtaatcccagctactcaggaggctgaggcaggagaattgcttgaacctgggaggcagaggttgcagtgagccgaaatcacaccactgcactccagcctgggcaacagagcaagactctgcctcaaaaaaaaaaaaaaaaaaaaaaaaaaaaggctgtctctcttacttcgtagtcatgcaggtatgtttcactttttccagattggtacaacggaggaaaagcaacacaggaaatgaggaagaataaaaaatgtttatacaatgaaaaaaagcagaagaaaacaaaacaaacaaaacccaacagtgaatgtgatgtagtcttgtaggctactgtcctagttcctcttgttaccaacttgctgagtaactttgtgcaagttacttagcttctctgggtttcggtttcctcttttgtaaattaagcagtttggatgatatcatctcccaactccaccagtacacacttattctgaagctcatgatatacatctattatttaaaatccagtgctgtgaactctatttcttcagtcagatcacacttgagtattgtgaggctaacataaaccaagtaacttgcgtttaatcataggattaaagcaatatactacaacttttatttgtccttttgtaatttttcattttcaaacgcccctagtggctaaacgatttagcctgtttaggaaaaaccagtttctcaactctgtgatgtggcttctgatgtgagggaacttggagctaaataaaataagtatgtgtcactcaaacattaacgattttccattagccccaccacccttcatccctaaggttatttggaatgtgtttctttaatgagataatcatttgttaatataatcccatctaagaaaatataaatcaaaaccagtggatttgaaatagattcaatatgaaaaaccaaattaaatgacaacggttaaaatatctacggagaacattctaaaactcacagaaacaaatgcctaggtctggggcatctggcttattttataaagtgaagaactttgcttgactggtgggaagcagagaggggaaagataatgtcccaagtaaaaaggctgacgtccagacaagaaaactagagtggataaatacgggcacgccctactcaaacccaggcctttcctctggaccctgtgatgcttctcaacactggcaacttgtcagtgtacctcagagactattctaggcggagattaaattcgtccttggcccttaatgtactggaaacaagttggtcaggccaggtgtcaggctgagaaagcacacaagtcgtggagttccaggtgtcgagtttggcaaaggtaaatgaagcgcctcggcaaaggcgcgggaactgtagcgtgcggtgtacctcctccttagcaaagctttctcaatgcctcttaggttagacccgccgcagggatgaaggggttgctggcggattgcaggtgcctgcagcacagggcccagaactaagaaccgacaacacagattcttaagccctgcttggagcactgctctgagctggcattagaaccgaacctagctgtactaagtataaaggcaaagtagttatgacactgttggcagtgaaattatacttggaactctttcgcagaaatcgctagggcctccctagctctgggccccttctcctccaggcgctccagtttcatggaaaggcttccctatgaaactgaaaacgcgctggtaagaaggagaaatgcgaccggactgcaattcccagaagccgtcgcaggccctcagcatccgggacactagcagcaaggatccctgggtattgtggtcctgtgctttgccagcaaccctctgccgacggtaaaattccagccggacatagaaccacaactcccagcaacccctgctgccgtgtggggggtcttcacgttctcgtggcgcggcgcaggcgcactgggtcctcggcgcggaccgcgcagactgaataataaaaggggagcggcgaagaggcaggaagacaagaccatgtcgaagggccccgggcccggcggctccgcagcttcctcggcgcccccggccgctaccgctcaggtgctgcaggcacagcccgagaaaccgcagcactacacgtacgtagagcccccccccccccgccgcgcgcgcacgcctgacgtcagcggccagcgtgagtcacgcgcgcagggagagcgcgaggcggcctcttcctcccccccttcctcctccggcccggcccagaccggttccaacctgctggggccggtcccaactgcctccaactgccaccaacctctggtcgggctgtggggcgggaaactcggtcccggccgccgagtggggaaggcgggagctcgggatgcagagtgcactctccctaggccaggccttcgaggcctaactgttcctcagaccataaaaccacagtagtaggctcctttggggcagtgagaagtccaagacacaaccaagaggagttccgtggggtccagccccagaacccacctatgaatgatgattaacgtgaagtcctgtcaggagattccgtgcagtttgcgcaggaagccttttgtgtccctaaggctcgtaggttgtccacgagggccacacttgcttgaattcacagtcgacgtagataaacatgcaaagatggaaacgtgtccgtgcgtgcccatgaccgtttccctcgcgggctgtgcggagcctgagtctgggagcccgaaggtgatgggttccaagtatgtctgcaggctcagcagaaatgtagcattagagggagccccaaatactgacactacaggagtccagcaggatgggaaaacctcttcctggaagtcttgcatctgtgtgcttttaggtcgctgtcttcatttccttcaagccacgttaagcattccctagagttaggtgatgtgggagaaagatgaataaggggcggtttctcctgttaagcaaaatgttgctttccattttccctgatgctctgtgaatgcctctcatccccatgggctcctgagtgatgtgcatgtttaaaaggatccccagctgcgagaggttttggaacctggggggttgaacagctcttaagttgttcagtgaacgaagaacagaatcatctgttggagtagaaagaactcaaaccagtcaggaggaactcttgttatagaagaccttgggaaactgttctggggttggggaacattggttataggaagtgtatggtttctttgtgggattctttgttgttggctgaaatcatttaagcttcttgactacagtctgactcacgttaaccattccttttctgatatggacattgctttcctggtcctttcttactggagatctttcgcagtctttccattgattttggtgagatgttcttagctcaaagactactgatgagttgaatggtgtagtcttgattttcgaatctggaaacttcacgtaattggaacttctttataatctctggttgctcagatcactgtttttagcaaaataaacacattttgagtcacgagagtcttggcttcagcaacttgtgtttctgtgttgtgttgtcattgagcatactatggaatctgtaatagaaaggctttcttattttggaattgacaggtgaaacaagtgaacagctgattaaatgtcagtatctgagtctttgtcctcttgatgctcatttgtttaaaacctgtctttcctgccgggcgtggtagctctcacgcctgtaatcacagcattttgggaggccgaggcggatcgcatgaggtcaggagtgaagagaccagcctgcccaatatggcaaaaccccgtctctactaaaaatacaaaaaattagctgggtgtgctggcgggcgcctgtaatcccagctactcaggaggctgaggcaggagaatcgcttgaacccgggaggcggaggtggcagtgagccgagatcgtgccactgcactccagcctgagcgacaagagcaaaactccgtctcaaaaaacagaaacaaaaacaaaaaaaaagcctgcctttccattccttgtgggtaagtatagagtaatgggacctggctcttgaggtgtcttaggaaatcaacaggagtaggtgaaatagccaagcttgatgggaggttgtaggtgttcttatctctttgtctgttcatatgtatgtgtgtttttatatttgtatttccaaaaatcagagatagaaatcagtggtctttcttgctagacttactagcattcagaagctgtgatgacctggaaaacttcatcccctagtcctcctagggctgaggtgcagggagcatgaggacacatatgatggaaccagcacacttgctggctctgatttttctttttcttttttttaagatagggtctctgtcatccaggctatagtgcagtgtcaccatctcagctcactgtagcctcgacctccctggctcaagtgatcctcccacctcagtctcctgagtagctgggactacaggcacacctggatacatttttttggtattttttgtagagacgtgattttgccatgttgcccagcctagtctcgaactcctgtgatcgagcaggcgcaagcaatctactgttgggccttggcctcccaaagtgctgggaggccaccacacccagctttttttttttttttcctcttcttaaaagagacatgggcagggtgcggttgctcacacctgtaatcccagcactttgggagcctgag[131 bp omitted]gaggcaggagaatcgcttgaacccaggaggcagaggttgcagtgagcagagattgtgccactgcactccaacctgggtgacagagtgagactcggtccaaaaaaaaaaaaaaagagagacgtgatctctctgtgttaaccaggtggacttgaattcctgggctcaagcagtcctgccttagcctcctgagtagctgggactacaggcacataccaccatacctgcttccctccacccccataaggtgaattcatttattgcccttgggagttagggggcgggagcattttgattttgattttaaatgaaaatttgagctgcttgggaggtaaacagtgggtacacatggacatacggagtggaataataattgatcattgataataattgatcccattttgaatacagagatagaccccttttgaatatttgtaagtttttgcctgtcaattttttcttttttttttttttggagacaaagtctcactctgttgcccaagctggagtgcagtggcgtgatctcagtttactgcaacctccacctcccgggtttaagcaattctcctgcttcagcttcctaagtagctgggactgcaggcacacgccaccatggctggctaatttttgtatttttagtagagacagggtttcactgtgttggccaggctgatctcgaactcctaacctcgtgatccgcccaccttggcctcccaaactgctgggattacaggcgtgagccactgttcccgtctgcctgtcaaattttttacctttttaaacttttatttatttatttagttgtatttttagtagagatggg[135 bp omitted]taaatttatttttgtcacccaggttggttggacagagcaagagacaggatcttgctctgtcacccaggctggtgtacagtggcatgggaaggcgtgagcctgagaaggtgtgagccacctcacctggactttcttatacattaattaattttgtatagttttatacctgatgttatttgaaattaggtaacatgctgtagtctttgcaataatccagagacacttgtgtgataattgagtctcactcaccataacagtaatcttggcaaacacagttgaatacactaaaagcaaaaaattatgttgccattggtttccctttcttgcccttcattcttgtgctgaaattaaagttcttagagtttgagccctccttttcctaaaccaagaggattattcataacatagtttaaaggataattttgttgattttttttttctaaactcttgaataatcttgctttaagggaaactttggaataatcctttcagcaaattggtgtagcaggcacttgtgctggacttaggaatccagtccttttagaaaacagttatgtcagaagttcctttattgtacagctccaagtatttgcttagcacttagtaaaacgataatgtatatgtattattattcttccaatacaagaaccacatgacctctttttttttttctgagaccgagtctcgctctgttgcccttggctggagtgcagtggcgcgatctcggctcactgcaagctccgcctcctgggttcacggcattcttctgcctcagcctccccagtagctgggagtacaggcgcccgccaccatgcccagctaattctttgtatttttagtagagatggggtttc[131 bp omitted]tttaatttgacaaataatgaatttaattcagctttgtttataacatactgtcttgtatattggaagagttttataaaaacgtttaagaatgaggagaacttttgtagcaatcacgtctcaaaatgtatctacaagtttagctaccttttggctttttgctgtattaacagttatactattgaaagtgtatagctgagcagggcgtagtagctcacatctgtaatcccagcactttgggaggctgaggtgggcggatcatgaggtcaggagttcgagaccagcctggccaacgtggtaaaacccccgtctctactaaaaatacaaaaaaatagctgggcatggtggcgggcgcctgtaatcccagctactgaggaggctgaggcaggagaatcatttgaacctgggaggcggaggttgcagtgagccgagatcgcgccattgcactccagcctgggtgacaggactagactccgtctcaaacaaaaacaaaaaaataaaatacaaaaattagctgggtgtggtggcacacactgaggcaggagaattgcttgaacccaggaggcgggggttgcagtgagccgagatctcgccactgccctccagcctggacaacagagccagactccatctcaagggaaaaaaaaagtttattcttgaaaggtcacagaaaaactaccatctgaaatatccagctgggtatgctagctatagtcccaactcgttgggaagctgaggcaggaggatcacttgagcccaggagttccagaccagcatgggcaacatagcaagacctcctctctactaaaaattaaaaaaacgagcctggtgtggtggtgtgcatctgtggtcctggatactcaggaggccgaggtgggaggatccctgagcccaggagatagaggctacagtgagccaagattgtgttactgcactccagcctgggtgacagagcaagaccctatctgaaaaataaataaataattggctgggcgtggtggctcacgcctgtaatcttgacactttgggaggccgaggcgagtggatcacttgaggtcaggagttcgggaccagcctggccatcacggcaagactccatctctactaaaaatacaaaaattagctgggcgtggtggtgcatgcctgtaatcccagctactcgggaggctgagacaggagaatcgcttgaacccaggaggcggaggttgcggaggttgcagtgagccgagatcacactactacactccagcctgggcaacagagcgagactctggcttgaaaaaaataataaaataaaaataaataaataaatattaaactctccaagtttctgacctcattgttttgaccccatgagaggaagtatacctcaaagactaatcatgtcttcatgccttcaactgcagtgactgcagtcggttctcagacttcttaattttaatgccctcatgttaaaggaaaatgaaattctagtttagtgaaggtttgcaggagttttctggccacttggtgatttcttataggtcgacagagaataaatactttatagcttcatctatctaggcatcatttaaatttaggactggtttcctgggcatcgaattaaacaaagataatgtagcaatacttccatagataactcttttcaggcagttttgtcagtttatgtattacgtaaatgtcattaacttcacttgattgcatctgattgtattttggaaaatcctggacatgaacatgtatttaagtcattattgcaaattacaataaaatcgtgcatgcattagtagagtactacttgttgcacaacagaagtcattggaagcgttgctgagcaacctcagtgagaacgagctacattaccaataaacatttctggatcttatttacttgtttatcaagtagaactaatttcttgcaggacagaaattaggagctcattgtagccttcatttaatcccacaaaatccccgttaagtgttaagtgcccttgctaagggtagattcttaaacttaacacctagttgatatttgctattatctaaattattaaagtcaagatttgcttaatggttaagtttttttgttttaatccagctatgttagatactaaagaaggcttccccacaacccatatgcatctgctttgactggtggtttctatcatcctacaaagactgtgacttattggtgagggcagctggacaactctgagagcaacttagagaaatccatcttgggcacactctataaaggagctccttctctgcaaatagcaccccagataagtgcacaaaagcaagataccctcgtggacctacacgtcctcccgcttttcaacaccctgatgcctgaaggtgaggtctctttcctgtgtgtcttagaagccatgagcacgcttaggtaactagagccctgccacagcctgagcagcacagcacacatctgcaggctttcctgccagacctttacctaaaggtaatttttctcattaggagagactccaggtcaagagtgatgacagtaaggttgcatttaaagctgcattacattaaatagtggactggtctagtgattattttcccacactgggcaatatttgcttaatgattaagtttttttgtttttgtttttgttttttttaatccagctatggttgatactaaaggaggttttcccactatccgtatgcatcttctctgttttgagattgcaactatggacagttatggctaatcctagtagattgtcttcccttttaacatcttggatgaatttgggtcacactaattgttatgtgaagatggatgttgaatgtaagtttctctgccattcttagccaatatataaaaattacattagcctaattgctaacaatgccaagaatttaggtttactatccctctggacaatgtagcttcttgttttcttaccatatagataactctatagattcaccccagccagtcatcttaaaatacctgcataggcagcagaggtatctgtggagaaagtgcatgggataataggtacagggtgattttgggagtgatggaaatattctggaattagatatggtgaaggttacataatgtgggtgaatacactaaaaaccactgaaatgtacaagtggtgagtttgagtgctctctgaattatatctcaaattgttaaaaagttaattaaaaaatcagtgtatatgagtccctcttaccatagagagggcttcaagcgcatggcctattgccaaggctcagcaacagtggttcagtgtgggaaagcctgtggtttgcgcaaagctccttggtgcccttttcccagctttctcagtggcttaggccctgtgtatctattctagttgaatgccgccatgttataagtctgtggagatgttttgagataagaaatacgtattcagaaaacaagtttgagactcttaggtgctggtaattatactttaccttgtctccaacttgatagccattccagggaacaagcagatttttagcaatgccttcataagatgaatcatgtctacttcctggggtgggtgggaggtggaagagaagtttgctgtcctgctaaaatgtaatagagtccattcttcaggtatcgtgagtgttttaaggtttacatgggcatttctttaaggacaggccatgtgttttaggcatttaaaatgatatcaatggctatactatattagttcaagtaatcacaacaaactttttattatttctctataaaatccctcaactttcaccccttttttctttgccagtgtgtagaatttgacagcagtatcaagagctgaggagaaggagaagatggaaaggagtctagcaacttaaaaatctcacagcattctctgtgaggtgaccttttttcctgttggtggctcaatttctttaggacataaagaagatactgaggcctgtgacagcctgtgacagtatcatcaagtcgtatctgaacttattgaactgtttcctccccttccttattctttattcacagtttgcttttcatgtgcataagttgactcatttgtttcctgttagcatttgaaacaccatatagccaccataagtcctgacaaaatgacttttaataaggagggggaaggtccatgtcccaccttcctatgaaattttggcctattcacaagtctacccccacataagagaagtagttatgttctgtaaagaagaggttgataaaaacctttagcatggtgttttgtgacttagaagttttaagtagtcgttcttatatctaagcatttattaattttggtaagaacattactatacgtttctgatgtcacttttactgttaagaggtgccaggcatctggtgacctgtcacttcaggatttgtgtgaatcagaccatctaaatataatataaattagagactggtacttgtatttcctgattaaaaacaaagtaacgtctgttttactattgaagtaagagtactttataatgaatacaaaaatgtatattaaatatccagtagagcatgctaaagtgaacatttctgtttttatttcagcaacttattttatggtattgtagttatggcctgtccgaaactctctgacatattctaaacagctttcagagagtcactgaggcttatttgctactactgttgtttttcctttagctcagttaagaaatgtttagttagccgggcatggtggctcacgcctgtaatcccagcattttgggaggctgag[133 bp omitted]gaggcaggagaatcactaggacccaggaggcgcaggttgcggtgagccgagatcacgccattgcactccaacctgggcaacaagagtgaaactccgtctcaaaaaaaaaaaaaaatgcttagttaatagtcagcatggtagttaagagtactgactccagggtcacaccacctgggtttgaggcccagctctgtcagttactagctgtgagatcttgggcaagtgacttacctctttgtgtatcagtttcctgagaataggaatattacctgtctcatggggttgttataagggtgaaataaatgagttcatacatgtaaagcgcttaaaacagtgcttggcacttagcacagcgtaggtactgttctccgccattatttgaacagggccctagtcactgctttcagttgcattgctccttgcttcaacagccctgattgaatgccttctttagttgcatccacactaaaatagatccttcagttcctagggcacgcacggggcagcagcatcttcagagaacagttctctcttccacgtccacttgaattcttatttcattctccagtctttgtagcgcctccatcatactgcttgtatcttacatgatggatgtgtgttctaaactgacccatgcagtttagggccaaatacgttgttgtacagaaaacaatgtacaaagaacatgttagtttaaacatattactaaagggtcataaaactggaggttttccaggctagctttttcaggttagctatgtacagaaaaactttgtgggctttttgttgttgttgttgttgttgttgtttttggtttttgagacagggtctcgctctgttgtccaggctggagtgcagtggtgtgatctccgctcactgcaacctccgcctcccgggttcaagtgattgtagtgcctcagcctcctgagtagctgagattacaggcacgcgccaccacacctggctaatttttgtatttttagtagagacggggtttcgctatgttggccaggctggtctcatactcctgacctcgagtgatctgcccgtcttgacctctcaaaagtgctgagattacaggtgtgagccaccatgcctggccagaaaaactttggataaagtcaaggtattatataatttgggggaggatgaacgggggtttgtagtactctcgaatattctctaacatcagtgacgtgagtgacccttatatgaatcttcctcagtttcaccagctctaggccccacagggcaaggggacagttatagaaagaagggaccatggacacacaggactaattgcacacccttcctggctcttgttagttcttggggccaggacagctcacaggtgtcagaaagttccagtgagccccagtgaaaagtgggctgaaataattgccagtgattggctcccccactgtaaaacactgacttgcttgagtgcccgtagcacttgaactgtgggttgctgtgtgtgtgtgcacgggcgtgtgtgcccaggtgcggtagggagtttcatcgcatctaggagcttcatagtagccataagatcatattgtatttactctgactaaaggccagtgtgggatcaaagactcccttaaaggttcagacacacttacaaattcaccagacacttattttatttgcctgaataatactccctgagcttgctttttctgccagagagaatattctaaatcaggatcactttagaagatttggaagccacatctctatagctgtgtagtgtgtcagatccatccaaatatttaaagcttttttttttttttttgagatatggtcttactgtgtcacccaggctagagtgcagtgacgtaatcatagctcactgcagccttgaactcctgggctcaaatgatcctctcacttcagcctcctgagtagctgggactgcaggtgtttaccaccatacccgactaattttttatttttaaatttgttttgtgaagtcaggttcttactgtgttgccaggctggtctggaacttctggcctcaagcagtcgtcctgcctctgctccccaaagtgctgggcctgagacaccacacccagcctaaactaaaagccatttttagtaactcccaccaatgtggttactgttacaaagttgtatggtttctgggtcatgtttggtatcagaatgtgtatgtatatccttataaatatggaatgtagaactgataatagtttacctatcagatttgcaaaaataaggaaagatttttagcagcttgtaacaaacatatacatacttggataaataatttagaattttaacccatggctcatatgctcttacaatattctctttgagggtaaaacatactttattcttaaacttaaagaacctttgataagccgtgaattatgatctcagtgactacatttctttttaggagttatatgtgggggaaggaaagaagtagctagcagggttaacatggaaagcaggagattatagacaagcatcatttgagcctttggatactacaaataatcttcaaaaatgacaggttttttggctttttgtttttcctttcctttagtgctagttgcagaatcctatcatattgtggttagatttcaataaagaatgtttaagattaggactatgtcttgctttttaaaaagatcctatattcatgttaaagcttgtatatatttgttttttgtttttgtttttgtttttgagatggagtttcactctgtcccccaggctggagtgcggtggcgcaatctcggctcactacaacctctgcctcccaggctcaagcagttgtctgcctcagcctcccaagcagctgggactacaggcatgtgccaccatacccaggtaatttttgtatttttagtagagatggggtttccccatgttggctaggctggtctcgaactcctgacctcaggcgatccgcccgccttggctgtccgaagtgctgggattacaggcatgagctaccacacctggcctatacttgttgaaaaagatgaaattcaatttttataagactggctgtaataaaatgaacattagtagcttattagggatatgggcagatctgtcagattgccctgtctttgccagctgctgtgtgagggtcatgagtagtgacactaagtggccaggagagcagcaggagctgcaggaacaggtgtttcctcactggccgctccatcttgaaaactcatggcccattacccaaggctgaggggcatccagagtgagttattccaccggctcaatctcttgtcccttttgttgggcttacatcttgctgttcactgcatgttccgggattcatgaagtcctgagcaaatctggtgttgcagcgccatctctttctgttggcttgtcttagttgtctggaggccatcattgtcttgcctatatgtctctgtactcaaatctgtaggtttgtccaaatcagattataaacaaacaaaacatacagggtggacattcatgcagacatgcactccacaaaaagattgaccacagctctttttttttttttttttttttaagacagagtcttgctcttgtcacccaggctggagtgcaatggcacgatttcggctcactgcaatctccgcctcccgggttcaagcgattctcctgcctcagcctcccgagtagctgggattacaggtgtgtgccaccacacccagctaatttttgtattttttagtagagacggggtttcgccacgttggccaggctggtctcgaactgacctcaggtgatccccccacctcagcctcccaaagtgttgggattacaggcaagagccaccacgcctggcctaatttttgcatttttaatagagataaggttttgccctgttggccaggctggtcttgaactcctgacctcaggtgatctacccaccttggcctcccaaagtgctgggattataggcatgtgccactacaccaaaccacggttaatttttgtatttttagtagagatggggttttgccatgttgaccaggctgatctcgaactcctggcctcaggtgatccacctgccttggcctctgaaagtgctgggattacaggcatgagccaccatgcctggccgatacccagcttttgtcagtagtcatcatgatacccattggttgttggaggaaatagaaacaggaattaatctgtagtggctgtgcatggtggctcat[224 bp omitted]aggcaggagaatggtgcaaacccaggaggcggagcttgcagtgagccgagatcgggccactggactccagtctgggcgatagtgcgagactccatctcaaaaacaaaaaaaaaaaagagggttgctggaggtcaggagtttgagagcagcctgggcaacatggcgaaacctcatctctacaaaaaaatacaaaaattagctgggtggggtggcaggtgcctgtagtcccaactactcgggaggctgaggtgggaggattgcttgagcctgggaggctgcagtgacctgtaattgcactactgcacttcagcctgggtgacagaatgagaccctttttcaaaaaagttaatctgtaatggtctctgcacattcccagcaccaatgacaaaagagccagatgccagcaaccgactctgtgtgtgaggcggaagatctcaattttagtgttcaggtgaggaacaaagctgagcagacgtgatgtggaagagagagcttactgagttaattgccaggagatgtatctaagtcagaggttggagttgctcctctgtgttttgctgggttcgtgcagagctgcttttgtaccaggtttctaccacttggggtgctttttgcttttcttttcacttcccacatctcaagcacctgctgtgggtcagctctgtgcaggggtacaaagatgatcgatgtggcagtgtacaaaacagtcagaatccactgtggtggctgtaccagcagtattcacatagtgcagtaggaacatggaagcgggggcaggcagggccagggaaccctcagggtgatctagacccaggggacaacatgatcaaaagtatggaaatgtaaggctgtgatgtgatggggcataccaactgtttagcgcagaggtcacctgtaatcccagcacttagggagcagaggccagaggatagctagagcccaggagtttgagacctgctcaggcaatacagcgagccccctttctccacaaaaaggggaaaaaaaagacaaaaaaacccaagtgtagagcagaggtcagcaaaccggcttgcatgccaaatccagcctgctgcctgcttttttaaggcccacaaggtaagaattgttttcactttcttttgagacaggtctcagtctatcctcctggctggagtgcagtggcacaatcttggctcactgcagtctcgacctcccaggctcaaagaatcctcctgcctcagcctcctgagtagctgggactataggtgtgcaccaccacacccggctaattcttgtatttttttggtagagacagcgttttgccacattgcccaggctggtctccaattcctgagctcaagcgatccacccgccttggcctctcagagtgctgggattacaggcatgagccactgtgccctcccttcacattttttcaatggttgaaaagatatttcgtgatgtgacgattgtatgaatt[136 bp omitted]cccgcctctcctaaaaataaaaaaattagctgggcatggtggcgggcgcctgtaatcccagctactcgggaggctgaggcaggagaatggcatgaacccaggaggcagagcttgcagtgagctgagatcgcgccactgcactccagcctgggtgacagagcgagactctgtctcaaaaaataaaaaataaataaaataacgcttcctttgaacctgcactcattcgtttctctgttgtcttggctgcttgtgcacttcaactacagactcaagtagttgcaacaggagactgactatatgtgatgctcattgcttctcattgctgcacgtgtcagcataccacattttttgttttttttgagacggagtgtcactctgtcgcccaggctggagtgcagtggcgtgatctgggctcactgcaagctctgtctcccgggttcataccattctcctgcctc[168 bp omitted]cactgcacccagccagcataccatgttttatacgttcttcatcaccagtgcatacctcttatgtcaaaagaagagaggaagagaaaaatgcacttcaagtattttacttttaaggctcggtggcatgtggattatttgttaacacatttggtggcaaagcacccaataataaagatagctgtgactgggcatggtggcttatgcttgtaatcccagcactttgggagaccgaggcaggaggacaccttgagcccaggagtcaagattgcaatgagctgtgattacactactgcactccagcctggtaacggagtgagaccctgtctctttatttaaataaagaaggaaatattcctttaaaatttatttttccttttttttttgagatcactctgtcgcccaggctggagtgaagtggcatgatctctgctcattgcagcctccacctcctgggctcaagcgattctcctgcctc[132 bp omitted]gcctcgcaaagtgttgggattacaggtgtgagccactgcacccggctccccccagccttttttttttttttggagacagagtcttgctctgatgcccaggctggagtacagtggtgcgctcagctcattgcaacctcaacttccctggttcaagtgattcttgtgcctcagccacccaagtagttgggattataggtgtgagccaccacgcctgggtaattttttgtatttttagtagagatgggattctccatgttggccaggctggcgtcaaactcctgaccctaagtgatttgcccgccttggcctcccaaagggctgggattacaggagtgagccactgcgcctgacctaaaaatttttttctgaccattgcttgcttttctgggaatcttgtgataagtgc[132 bp omitted]ctgcaacctcaaactcttgggtttagtgatcctttcacttcagcctcccaagtagctgggactacaggtgcatgcctggcttagttttttaaaaaaatgttttaaaactgttttagtgatggggtcttgctatgttgccctcaaactcctaggctcaggtgatcctcccacctccgcctcctgtgttgctgggattacggggatgagccactgcatgcagctaggaatatttccttacagcagaatttcttcacaagaattaaaactacatttttgtagtttcagttgcaggctacaactgaagcaggtttctgagtggctcatttgttagctaggcaaggaaagccatttactgatgttgagttaattaaattgtgtttgactgcagcagctggagaagtgtgtccagataaaacacatttttgtttgagagtgttagcttttcagcaggaacagtgtctcaaaatgttgaggacattaggagcaatgtcagtagtcaattaaaaaagaaggccgggcaccatggcccacacctgtaatcccagcactttgagaggccaaggtgggcggatcacgaggtcaggagattgagaccaccctggccaacatggtgaaacctcgtctctactaaaaatacaaaaattacaggccggacgcggtggctcacacctgtaatcccagcactttgagaggccaaggtgggcggatcacgaggtcaggagattgagaccaccctggccaacatggtgaaacctcgtctctactaaaaatacaaaaattacaggccggacgcggtggctcacacctgtaatcccagcactttgggaggccaaggcgggcacatcatgaggtcaggagatcaagaccatcgatctcccaacacggtgaaaccccgtctctactaaaaaatacaaaaaaatttagctgggcattgtggcaggcacctgtagtcccagctacttgggagcctgaggcagaagaatcacttgaacccgggaggcggaggttgcagtgagcctagatcacgccactgcatttcagcctggtgacagagccagacatcatcaaaaagaaggccgatttcatgtggtttttcctggctgtcggtgagtccacagctaagaaaacactaattcagtacaacctaaagtgtaatctgctagtatcttttacagctggtggtggtaaaaatatgtgtacagcggaagaataattggacaaatttacaaaacttgtgaaaatgtaaggtggtttattcattgtgttattcatcagcaggtactttgcagaaaatatcttaatttatcatgtgttattgaactcttagcatcagtaattttacttggttttgtgaatcatcatcagttccataagtttttgtcagaaatagaagctgaatattctgatgtgccctgccgcgcagtagtttgatggcttagcagtggtagttttctttcaactttttgagctcagggctgagattgaaaattttctgaatgaggagaatcgctcccaaccactattgaatgctgaatggctttggaaattagcttttgctgcagactaggtaatgtttgttaatgaattcaacctaaaactccaaagtaaaacagtgcttatgcaaaccctatgcttcagggaagtcatgttgatgacagcaaatgtttaaatcatatgtcatgttaaactgccttgtatacttcctgtgctggcaaaagtgaaaacaaaggcaagctctccattcctacacacatgttccaaatgcaggctatagttctatcagggattttgcatctcaatgtgaacacaaaggaaatttctctaatttgaaatccactgggtgggcgtggtggcttatgcctataatcccagcactttgggaggcaaaggtgggtagatcacttgaggtcaggagttcaagaccagcctggccaagatggggaaaccccatctctaccaaaaaatacaaaaattagccaggtgtggtagcgcatgcctgtaatcccagctactcaggaggctgaggcaggggaatcgcttgagtgtgggagacagaggttgcagtgagctgagatcacgctgctgcactcctgcctgggcgacagagtgagactccatctaaaaaataaaaataaaaaatccattaatctgcgcaactgagtttatgccaaatcttcaactggaagagattaaaagagaagtattaagattaatagaattctggccaggcatggtggctcatgcctgtaatcccagcacattgggaggttgaggcgggcggatcacctgaggtcaggagttcaagaccagcctgggcaaatatggtgaaacactgtctctactaaaaaatacaaaaattagccaggtgtggtcacgggcacctgtaatcccagctactcgggaggctgaggcaggaagaatcgcttgaacctgggaagcagaggttgcagtgagccgagattgcgccactgcactccagcctggtcaacagagcgagactctgtcttaaaaaaaaaattagtagaattctacaattgtc[174 bp omitted]ggcaggcgcctgtaatcccagctacttgggaggctgaggcaggagaatggcgtgaacccaggaggcagagcttgcagtgagctgagattgcgccactgcactccagcctgggcacagagcgagactccatctcaaaaaaaaaaaaaaaatattatatgcttgagccttggcaacacagtgaaaccccatctctacaaaaaatacaaaaattagctgggcatggtggctgtggtcccagctacctgggaggctgaagtgggaggatcgcctgagcccaggaggttgaggctgcagtgagctattgcgccactgcactccagcctgggtgacagagtgagactgtctcaaaaaggaaaaaaaaaaaaaaaacaagcccacatgcttgtggaatgttatcagcatttagcaatacctatgtatgtgaaaagacattttcaaagatgaaatacataaaaatctcattacaggccaggtgtggtggctcacacctgtaatcccagcactttgggaggtcaaagcaggggaggattacttgagctcaggagttcatgaccagcccgggtaacatagcgagatcttatctgtactaaaaataaaaaaaatttagctgggcatgggggcacgcgcctatagtccagctactccagaggctgaggtgggaggatcacttgagctcaggaggttaaggctgcagtgagccctgcttgagccgctgcactccagcctgggcaacagagcgagcccctgccttataaaaagaaaaatgtgtgtgtgtgtgtgtgtgtgtgtgtgtgtgtgtataatatatatgtatgtattatagaatcagaattaacaatgaacatttgtaatccattttgatgaaagggatcccccaactttgcaaattgttatcccctcaaaaagaaatctaaagtccgctgggcgtggtggctcacgcctgtaatcctagcactttgggagactgaggcgcttgaaccccaggggcagagattgcagtgagctgagatcacaccacttcactctatcctgggcaaaaaagcgagactccgtctcaaaaaaaaaaaaaaaaagaaatctaaagtctaaaatatttaccatctggtcctttacaagaagagtttgctggccgggcacaggggctcatgcctgtaatcccggcactttgggagg[137 bp omitted]gctgaggcaggagaattgcttgaacctgggaggcagaggttgcggtgagtgagccaagatcgcaccactgcactctagcctgggcgacagagg[136 bp omitted]acatggtgaaaccctgtctttactaaaaatagaaaacattagctgggcgtggtggcgggtgcctgtaatcccagctactagggaggctgaggcaggagaattgcttgaacctgggaggcagagattgcagtgagctgagattgcgccactgcactctagcccaggcaacagtgtgagactccgtctcaaaaaaataataataatagtaagagttaaattcgggctctaggaagagggttgagcaccatgcagtgtcatctggacagagaaaggccagaaacagggaagtcagtttaggaaaaggtcttaagtccctgacccagggcagtgggaatggaagtgaagaggcttaacatggaatctgtagctcactgtctgtcctgatctgtgagagccctgccagccagagcctctgtggagtctcatctgcacgtggcactgtggacatgtctgccccaagtcagcaggctcaccaggtctagcccctgtcctcggggacctttccttctccaggacagactgtgcccagaggcaggctgaacatatcctaggtttctcctcctgcctccctgtgctttcatgaggcactgacaccaggcaggcatgtgtcactcttagaactaccaggtttagcaaataaaaataaaggatgccagctgggaatagtggcgtatacctgcaatcccagctactctggagactggggcaggaggattgcctgaggctgagagtttgaggctgtggtatgccatgattgagcctgtgaacagccactgcactccagcctgggcaacataacaagaccctgtctcttaaaaacaaaacaggatgccagttacgttggaaacagataatttatgtatttatgtatttatttatttatttttgagatggagttttgctcttattgccctggctggagtgcaatggcacgatcttggctcactgcaacctccgcctcctgggttcaggtacttctacctcagcctcctgagtagctgggactacaggcacacgccaccacgcccagctaatttttgtattcttttagtggagacatggtttcaccaggttggccaggatggtctcgatctgttgaccttgtgatctgcccgtcttagcctcccaaagtgctgggattacaggcatgagccaccgtgcccagccgtttttttatatttttagtagagaccgggtttcagcagtttggccagtctggtcttgaactccagacctcaggtgatccgcccgccccagcttcccaaagtgctaggattacaggcatgagccaccgtgcctgaccagaagcagataatttctttaggataagtatgtcccatgcaatatttgagacttaattaggctaaaatattattcattgcttatatgagattccagtttaactggatgttccttccttaatctgcccattctaaccatgcctcactcttctgtgttcctggctcggggcccagcttccctctttcaggaaagttccttctctcccattttctgttacctcctgaggtagtttctttgtgggtccaaaaagtcaggaagaggatgtacctcccaggagagggatggtcctaccagtttgaggaatgggtatcccagctcagtgccaggcgtggtacctttgtgtagcaggagggcacagctttttgtctaaccagacagtaaaggagaagaacctttgcttcaaatgccaaagggaccagaagagcatcaggccatagggaggcttccagatttctgcctggggtcttcaggatgtacctggagcccagagatgaggcccttgaaatttgcagtttgcctcctgtacctcacctcatcctccttttctcttttccagttcccttcctattccacgcacatccacgaaggtactgggagctcttagaaccagacatactctgtttctaagctcatactgtttctgttccaaaaacaccttcaaattcttcatccactagtacctctcctcccctcttcccccttcctccttcctgcatcccagcctgggtcgaggatcccttttttggattgacttctgttcccttcatgcttctttctgcagtctccaagcctctggcaccatccttctcgatgacgttagatgtcctatcccaagccatttgttgcttgcatttttaggctcgagagactaaagagaactatactaactgcctgtccttctggggccaggggcaggggagcccagtctaggagaccccccaacctagacacatgtagcaaacaaaaacccagatgtaagggggtaagtgggtctggggccttccactgggtggaatgtgggagaagagatttgggagtgtcttggctgttacacatgcagggcagaggagagagaccagtgaaggttgggaggaggcggccaaaaggagacagcttcatgcccccaggacataaatagcccggctgctgcaggtactcacatgaggtgacacgactggggacagaacaggctggagcggcgggggcgggggcgggggcgggggggcgggtatcttcagaacttcagtatgagattttccccaagcacagatctaggtagtgctaggaaatgtctctgggcggaggcgggcagacaggacggtaattactgagtcagtagtcccgagggatgccttgtgacctgggctttcagcttcagagctgaaaagcctaagtgcttatctgtagatttctcctctcagcccacagccccagctcatggtacaggcaaggcctgcaacaacaggcaggtggacctgggtagcagaggcctgtagagtttggcagaggcgcctcatgctcttatttgcagccctttgcctgtgattagtggtttggcttgggaaaccttggaaagggctcagagaaccaagctgctgattaacgccacagctggtcaacacagcggacagctgaccgccgaggtccctgtggtctgtggttcctgcctttcaggctggtgtgggactggggtgttggtttggatcctagagctgaggtgtagccttacagctctgggtctctcctggtgttccagtggaactagcaccccagagcagggccctcaggggacttggcggctaacttcttgctgggaagcaagagacttcattctctgctcccggcctgccccacgcggggctctctctgcaggtacctgaaagaattccgcacagagcagtgcccactctttgtgcaacacaaatgcacgcagcatcggccctacacctgcttccactggcacttcgtgaaccagcggcgccgccggtccatccgccgtcgggacggcaccttcaattacagccctgacgtctactgcaccaagtacgacgaggctacaggcctctgcccggagggcgacgagtgagtgacccagcctgtcctcagaggagccccgtgtctccttctgggtcagatgccctcagggtaggctgggcagattctgggaagccatccagaggactggttgcagcccagcccatggcccgagcctggactcagaccccaccatccctggcggtaggctgcggggaggtaccatttccctttcccacttttaggaaacctaagacaggcctttctttcactaagcctaagggcccacatctgaacccaggaggctccctggccttttttcatcctcccctggggatcacatcccatgcagttcccaccaaagctggctgtttagagagagcgcctcactggtgcccaggtttgctgaccctaaatatcttactgcaaatctctgtagagaaatagggcacagcactgacagacacagggaggtgccacacctgggagtgtcgcactaatgacagacatagggaggtgccacacctgggagtgtcacactaatgacagacatagggaggtgccacacctgggagtgtcaccgacggaacattcactgaccctgcttgtctcatagagccttcccttcgtcagccctctttcttttttaaaatttttataattttatttatttatttagacagggtctccctctttcccccaggctggagtgcagtggcagcatcctcgctgcaccctcaaactctactctgttgcccaggctggagtgcaggggtgcgatcttggctcactgcaacctccacctcctgggtgcaagtgattttcctgcctcagcctcccaagtagctgggactgcaggcgtgcaccacaatacccagctaattttgcatttttagtagagacagggtttcaccatgctgaccaggctagtctcgacctcctgacctcaggtgatccgccctccttggcctcccaaagtgctggaattacaggcaggagccactatgcccggcttcagttgatttctttttttttgagatggagtccgctctgttgccgaggctggaatgggcacctgcttccactggcacttccatgtcggctcactgcaacctccacctctcgggttcaagcagttctacctcagcctcccaagtagctgggattacaggcgcaggccaccacgccctgctaattttttgtatttttagtagagacggggttttgccatgttgtccaagctggtctcaaactcctgacctcaggtgatccacccgcctcggcctcccacaagtgttgggatttacaggggtgagccaccacgcctggccatgatttaaaacatttttaatttgtagagatgggtgaggggatgtcttcattgtgttgcccaggctggtctcaaattcctggcctcaaatgatcctcttgccttgcctcccaaagtgctgagattgcagatgtgagctactggcccagcctagcacctctttctcacggaggcccaaggcttgctgaccctacccctagcctaacgaagcactcaggggatgaaggctatacctgagttttgagtagatcatttgcttctctgacggcccccaagcctgggcagcatttgttctccgatgtctgtcctgccctggaatgccaggccctgttgggccccatttaggctgcaggcagcagcagggcagttctgttacctcgcagcagggctcatcattgccttcttcctagtgcaccttccaggccatagtgaaagctgttcaatggttggggaaaggccaggcgcagtggctcatgcttgtaatcctagcactttgggaggt[134 bp omitted]gaggcaggagaatcacttgaaccagggagtcagagttgcagtgagccaagatcgcgccgctgcactccagcctggcgacagagcaagactccgtctcaaaaacaaaacaaaacaaacaaacaacaacaacaacaacaaaaacagttggggtaagggcagggggtaggcagggaagcctaggctgcaggcagcaaagttgagtgacccccactaccgtgttccaggtgcccattcctgcacagaaccacaggggacactgagcgcaggtaccaccttcgttactacaaaactggaatctgcatccacgagacagactcgaaaggcaactgcaccaaaaacggcctgcactgcgcttttgcccacgggccccatgacctccgctcccctgtctacgacatcaggtgggctgggtgctgggctgggctgatggcagtaggctggggtccagggcaggggcctggcggctaatgatggtgagtacctcagactgcagtggagggctggcactctggttcttgccccctcatgccccctctccaccctctctgttctttcctctcctcccagggagcttcaggccatggaggccttgcagaatggccagaccacggtagaggggagcatagagggccagtcggctggggctgcgagccatgccatgatagaaaagatcctcagcgaggagcctcggtggcaaggtacaggcatccacacctcggccgcgccctccctataatcctgctcatagctgccctggggatttggctcaccaccacctactgcctgctctagccgaggccccgacctggcccgcatcccaccctacacccaccattcaaaaggcgcctctaggggcgttttccctgacacatcatgttcccaagatccctccaggctttcacatgtgcacaggcacgtacataagcgcacatgcaaatgttttccgccctgcaagagtgccctttcaccctgtgagctgtgagtgtctctctgatggacagcatctgttgtccttgctgcacctggggctgtcccatggcctgggaggaggggccctactcacatctggcaggggcctcctgtcttgaactccttcccagtggcttctccttccctccactccagtcctgctagtcttggggtgctccagctcctctcacctgacccctgccctctggccccctgtgcagagactgcttatgtgctggggaactataagacggagccttgcaagaagcccccgcggctgtgccgccaaggctatgcctgtccctactaccacaacagcaaggaccggcggcggagcccccggaagcacaaatacaggtccttaggccccaggaggccagccacgggagggaggagtggcagggaaggggtcaggcagaggctgctcccactggctctccgggaggaggggaggctggtcctggggatgacaggatcgcaagcccagggcccaggggagggcatagtgaggatagctggacagtaggagcccagcttcacctcctgcatgaatgaggaccctggtcagaccgtctctgaggctccaccgctcctgatcctgaggggaatgtgttgaatgaggaccaggccacagcgtggacagtgtggttgtagctccagcctgaccctacttgggctagtgggagggcctggctgaggggaatcaaacagtatcctttgtggtgattcggccaggctgggtcagagaaagagcttggcttgtggcaccagcaaggccctgactctgcagctggtcttttccatttctgtgctcatgcctatgaggctgggtccaggtggcacctgctaggctccgatctcaccttctcctttctccatctgaccccaccctcttgttggccaggtcgtctccatgtccaaacgtcaagcacggggatgagtggggagaccctggcaagtgtgagaacggagacgcctgccagtactgccacacccgcaccgagcagcagttccaccccgaggtgggccccacagcagggtgggggggtggctttgggaagtaaggagagaggcaggcaggatcagtggagatgttggcagaacccatcctgatgccatcctggaagagggacttgtggccaccagctctcccctggcagtgcctagaggatccctgcatgctgaatttggcatcttctcctattctgagcccacgctcaccaagcagccctctgcttccagttctgtgtcccccaggcctcctgacagggcaggtgtagatggagtgtggcgacctggccactctgggctttccaccactcatggtgcttgtaatccagtgacatcaggattgaaaaaatagggccaggcacggtggcttatgcctataattccagcactctgggaggccgaggtgggtgcatcacttgaggtcaggagtttgagactaccctgcaacatgctatctctactaaatgtacaaaaattagccagatttggtggtgagcgcctgtaaccccagctactcgggaggctgaggtgggaggatcgcttgaacccgggaggcggaagttgcagtgagccaagatcgcaccactgcactccagcctgggtgacagagcgagactccatcaaaaaaaaaaaaaaaaaaaaaaggattgaaaaaaagtaagctccttcctgttgccctgtctcctatcagggcctagattatcagcaacctccctaacacagttcccttgccctctggccccaagaggtagcctgggccatatctgtgtgcctaggtcttgtctggggttcagagaggcacctgcagtccctgcccttggtgttccatggaagccaggacaccctgaggtagacacgcggacagaaactaccttatgtagctgcagacagcagagtggaaggttacttatataggtcacaacccagggtatcctgacagggttcacattggcaggggtagttgcctgagattgtggctcccttaatgcccaggaggcacgcttggaggcacagacctggccatgcccgtgagtggagagtcactgggggatccctttgggagggctggtgggacctgtggccccagaacggaggctgtcagtgacaatggggagtggtggtgggctgcctcaggagtttgagtaagaagctggtagggagagacatagtggaggggaggggaggggccgggaacacagggcaagagatgactaagccagcgcactcatgctggaggaaggggagcctgcccggccttccctcagggcctgagcctgacttgcctgtgctctgccctccagatctacaagtccaccaagtgcaacgacatgcagcagtcgggcagctgtccccgaggacccttctgcgcctttgcccacgtagaacgtatgctgttcccattgccccggggcagtgccctctcccacccctccctcgcctggctagctcaggcttaggccggggatggcccctggcagtatgccctgcacaggagttctggcctgccagcagcaggccttgtccccactggaagctccattcccccacctttctggaagtagccttgaaggcctagagcttccaaagtagtgagatagagactgcagggattgtccgcctggttgagcactcatggttccagggagggttgaggcactgtgcctcccatggctgacttggcaaatcccaccagccaccccatgtcatacccatgacagacatcactaatggaacatggagctcttctctgctgagtcctgctcaggcctctagagcagagctagccagtcagaatatagtgcaatccccatatgtcattttaaagttaaaatatttaagcatgttaacaaaaatagcaaaatatgaaaataagctgggcatggtggcacacgcctgtaatcccaactactcgggaggctgaggcatgagaatcacttgaacccaggaagcagaggttgcagtgagccgagatcatgccgccgcactccagcctgggcaacagggcgagactctgtcttaaaaaaaaaaaaaaaaaaaaattaaaaaagaattaaacattggaaaatatgttgttaaattaattttaataacatatttgtatttagcccaacataaaaggttatttcaataatcaatatacaaaaatatcaagacatttcacctttttttgtactaagtctatgagatctgatagcattttaatgcctacgggatatttccattcagaccagcctgtttcaggggctcagtagccacatgtggctttcggctgccttgtgggacagtgtgggtctggatcctcagcatgatactgtaggccgccaccagtctcagagacagagctccagtttgtacctgttaacacctctttccaccccaagatactgccctgggtctccttaacctctttccaggctcaggccctatctctgagatgagaatggaaaataaatcgagggccctgggcgggagaagcatattcttgatgcagaggtggtccccggccatgggcattgggaccgcctggctgagacggcataaggaagtgattcaggctttggagttgtacagatcagcgttcaagacccagctcctctgtgttttagctctgtcactttggtgggtttaccttacctctctgagcctcagttttcttatttataaaatggagaccatattactggtatcttctggtcaccatgaagattcacaattactgcaaagtgctggcacagtgcctggcacacagtaaatgcacagacatggtgttactagagatgtcgtaggaaccttccctttatgtgcagggggatttgtggtctcctttggaagggacccaggagcatttttggagggacagagctggctggggcctgctgacccctgcccctgactcttgcagagccacccctgagtgacgacctgcagccttcctcagctgtgtccagccccacccagccaggtcctgtcctgtacatgccatctgccgccggagactcggtgcctgtgagcccctccagcccgcatgcccctgacctcagtgccgtacgtgtccatcctggggagtgggtgggcaccatgcctgacagagccaatacttgcctcctaggccctttcagcctgggcttgggagaccatcctggtatttgtcctcaggccagggggatctgtcttttccatctcagcattcttcgtcaaaagtccaggcccgggggtggggtagggcagtccccagagcctgtgctgatgagcctgtaggactggtggcagggacaaagcctgaggtcactcccctttccttcgtgagcttcgggctccccgagtggtcactgctgctcgttggcagatgaaagtggaactgagccccttgaagactccctctggagagggtggaggatgggccacgcaccagcctgcgctgtgcccacgggcccactccctcccctccttctccgcagctcctctgtagaaacagcagcctaggcagcccgtctaacctctgcggctccccaccgggctccatcaggaagcccccaaacctggagggcatcgtcttccctggggagtctggcctggcccctggcagctataagaaggctcccggcttcgagagggaagaccaggtgggagccgagtacctgaaaaatttcaaatgccaggtaagggatgagggaggcagcagtgaggttagccttctcctgcgtggggcaagagaatcttggaggagtgtcttggtccagctacggggaggatgactgggagctaggactccactgtcctcggcctcttcaggactgaacagagggagcagtgtcagcccatttgcagctgaagacaggaaggctggggaggctgcatagcctcccctgggctgcagagctggttaggagaggagccagatcccgcctgggtgcggtccttcggctgccctgaactgccttcatggaaagacagggcctggggaagcaggacacaggggtccctaactgggcctggagagataccttctgggcttacatgaggcctagtgtcaccgggaggagaagggcagctccctgcttagggtaggggaagggagtagggggtggggaggaagaagggggtgtgtgcatgcatgtgaagaggggttgcatgtctgccaccacctgccccctggtacctgcagcctcagggtcagatggactcagggaccccccagcaccacattcatccactccctgaattttctctctcaggccaaattaaaaccccactcattagagcccaggagtcaagagcagcctctgcttcagcccaaacaggtatagagctctcagcccccttcctcccctctgctgtggacaggagtggcccagaaccccaggaggcttcggggagtgggaggcaccacttttcccaaaagctgagggcaggactaaagtggggtcccagccacaaatccagagagggtagggggtcaggccctggagcccctcacctcctagactcagtggagaaggtgttcctggagcctctgcactctgccaggccctgtactcgcttctctcttccctgctacaggactgtaggggcgaatgggcctggcagcctccgcacctccaactccatgctctcaacaaggtgtcgggtgtgccggggcccatgtgggcatgggggcacccggactagagctagcacgggccatttcccttgcccccagcccctctccagcctctcgtcctggcctccgtatgcaggcctaccattgcttctcctcttccctctctcgttgcaggacatgctgggcatcctccccgcaggcagccccctgacctcaagcatctcttctagtatcacctccagcctggcagctaccccccctagcccagtgggcaccagcagcgtccccggcatgaatgcaaacgctctgcccttctaccccaccagcgacacggtagagtcagtcataggtaactaggccatttctgtttgaaagcccaggactgggtctggggtcagagaccccccagtctctgaagcgagtctcaaatcagcacaccagaccccttagacatctgtcttcggaaaatcaggggatgggcactctgagtcctttgagctaaaggggaaatgaccccaaggtgtagggccaggactgacccttagagctcctttgtgcaaattagaaagaggtgccttttccccttggtgagtacagtctcaccccaagacgtgttgttcagtccccactcatctcactggtgtccttgtgtagtgaatggccagcacgacgttctcagaatccctggtgctagaagttggtgctcctttctttcagtactcatttctaggtgcccgctttgtgccaggtcctgtggcaggcactgaggagacagatgacaacatgctgctcctgccctctagagggaaacttcccacccagtggacatttgtcaagcacctgctatacaccagccactgagtgcccagagacccgcccacccccactgatcccggggctgagacccttgagttgtaacatcaggggacaagacccttgtccgaggcagggaccctggatggggatgtgatttctcctggaagtatcaaagaagattcagaaaggagaggcatttgggttggacatgactggcagacggtgtcagaagtcaggagtcaggattggcataggaagcagctgaaggaagggcacaggggcttgggagaatacggacccagcgtagcatgggcgtgaagatgcagcgtgggcagtagacgaggtggtcagggtcagatagtccctcgggaggtcacatcccactcttctctgtccctagagtctgctttggatgacctggacctgaatgagtttggcgtggccgccctggagaagactttcgataacagcacagtgccccacccaggaagcatcaccatcggtactgggtgtgggtgggcagggcagcctggaggactcctcgggttcctgcctggctcaggccccttgctctgtgtggcccgcctggcttccgctgccctcacccagcccgtcctccccgggcctctcttgcaggcggcagcttgctgcagagctctgcacccgtgaacatccccggctccttgggcagctctgcctccttccactcagcatccccgtcccctcccgtcagcctctcctcgcatttcctgcagcagccccagggccacctgagtcagtcggaaaacacatttttgggaacctcagcatcacatggatctttgggtaagagagggagtggttcactcaggagaactggggcaggaacctgcgcctttaggaggtgcctctggccaccccatctacggcatatcagctaggctgggggttagggcagaggccttgggcgaggaggcagagtcagattcctgtctgtgtgaccctggacaagtgattgagcctctctgccttagtttcctctgctgtgaaatgggtataacggcagcatccacctcctaacgttgtgagcattgaatggagtaatggggctgaagtgctaggcacgaggccagtgcaggtgagagcaggggtctcagttgccagggctgggcctggtctctttcacagcatggttctgttctgcccagtcaccccaggctccgagaggctggctcgcaccagccaggttcacaggggaccaagggagaagccagacaggttaacccctggcttcgggtgcccttcctgccgggcagaggctccagggaggcccagggctggcccagaaggctgtttgcccacagaattagaatggtatggaatgggggtttctgagggcacttcaaggtttagtggctagaagaatggcacagaggcctgtgccactgcgggccggctgtgcatctcctcttgtgtgtgtcaggggatgttcctgagggcgggatgggaagcacatggcaccaccgctctcactctcccccagcagctgcagacaccaggagctccctccccgagagtgccagcattttgctcgggcccagggaatgagcccttcagagttctgattgggtttggtggcttcccttatctcattcctgatcccagaacagcacatggatttctcagcgccttccagtttgaagaggctgttctctgttacgttgattctgtcagctttaggtgcttggtgttgcatttttcggacttgccccatattcggataggatctgttttttttttttcgagtagggtctcagtctgtcacccaggctggagtgcagtgcagtggcatgatcctagctcactgcagcctggaactcctgagctcaggtaatccttccacatcagcctcctgagtagctgggaccacaggcgtgcaccaccatgcccagcttctggtggcgtctagacttagctccacttactggccacacactccttcctgcaccatgtgactattgagcacaggtgtattgatacaggtgtaagtgcaacagtccctgctgtccagcagctgtggccagtgtgggaagcagaggtgcccagccattgggatcctcctgagaatcatagaggggcctacctggacagcagagtcaggagagcttctccaagggaggaggagagatgggtgggacaggagagcttgctgcagggctggtctcatgtgggtggggtgaccctgaggtcttcctctgggatggggcagatggctcagacagtgcatgccacagggtctccgcacaggaccatgtccctcctctgtgggtgcacttgtgtgtctcagagagcaaagcgtcttaaatctggttctggaacatcctggttggattagtgggaaagggagcaaggaagaagtcaccagaaagtacatatgggcagagtgaggccagaggtggatatgggtccttctcggaagcccggggctgccctgggggccagagcagggggacctgatgttagtaaacatctgttgagcgagtgagcagagggcagctgggttggcggtgggtgggaggctgtgcacgcagcatagttgactggaaagcataggcctttggaaccacactccctgtctgtgtcctggccctaccacttacaatttgtgtgattcttggtaaaacattttatccagggtccttgtctgtaaaacaagggggatggccccaaggctccctgagctcttcctgccccagctctgccatccgatgaggctctggcctgtcttttcccctttatctcttcctgggcctcacatcaggctgcaaaaaggccctagcctaaaagtgaagccacaatcataaattgccactatcgggggcctgggactgctctcacatgcagtacttcctgagtcccctgagttacccggtgaggccagtgtgggagtcccatttcccacatgagggtgctgagcctcggaagttgagtggcaccaactagcaggtgtcactcaaggttaggtctgactccgcccacgccacctgcaccttcacagccttcctgtccctgcaaaattctctggcctgacactagctggagccttgcacacccatccagtggacagccagtccctggaacctctgaggcagggctggccagggcctgggcccaaagccctccggagctgatgttcttcccctccttggggcaggtctgaacgggatgaacagcagcatctgggagcattttgcctctggaagcttctccccgggcacttcccccgctttcctatcagggccaggggctgccgagctggcccgacttcggcaagagctggatgaagccaacagcaccatcaagcagtgggaggagtcctggaagcaggccaagcaggtaccaggccccgtgcctgccggccttccccagtgccaggtggcatccagcccaagaccttccttcacagagtgggcgtggggtgggggaaagcgggggctggaagaacagagcagaaactcagttttgttcgctcgctctccccctgggaggactcgctttgccagtcaggaccctgggtggttactgttgttgcaggcttcaaattctctctgtgagctgcttgtagtctgtcccaggatcacctgcctcctcccagtagcctcgcctctccagggtttcaagtccaaggttctgggttctgaaatgggccccctgtccagctgcagccggctaccctatgggtgctggccagaatcccagctctaccctgtgtccctgctgtgctaggcccaggtccctttccctggccacagaggggagagtctcctgcaggttctgaaacctctgtgcagacagcatcagcctcctccttgccctcctcccagagagccaacccagcttcccaccaggcctcgcagccagagtggcccccaaaagatgatgctctctggggacaggggcagggcagggccattgtgatgagactgtatgctggccccacaggcttgtgatgcctggaagaaagaggcggaggaggctggtgagcgggccagtgcggcgggcgccgagtgcgagctggcccgggagcagcgggatgcactggaggtgcaggtgaagaagctccaggaggagctggagcggctacacgcggggcctgagccccaggccctgcccgccttctccgacctggaggcgctctcactctccaccctctactccctccagaaacaactgcgggcccacctggaacaagtggacaaggtcagcccaggtcggggagcactgggtgggatgcacggtggcctcagccagctcttggactctgacctggtccaggctgctccagggatggccaccctcctgagagcctctgcccagcactgggccagcactcaaaaggccggcctgctgggaatgggtgaggagagtgcactggggaaggtgaaaaggctgggggtgaggggtgtcggtgccacccccagcacccctgagggcggccctgaccaagcttctcacaaatgcctgggccccaaatgcgtcctcctgtacaccctccatggagcagcgggccttccagtgaggcccaggaccccagggctacccctgccttcccaggtctcctgctgggtccccggggccaacgtggcatggtgggaagagctgtctttcctctgttctcgggcagccaagcccccgggtgtggccctgggcatgtcccagccctttctgggcctcattttccccatctggggattacaaggtcaaatgagactgggcgaagcctctctgaggggtgggtcttgtggcagcctggccatgccccatgcagaggtggactcagcctgctctctcacctgccaacaggggtctgggagcacactgttgagctcggtacctcagttttcccatcccaaggggctgcagtgaggatcaagggaactcctcgctcaacttggggccagacccatggatggtgaccacgatgcccctttccctgcaggccgtgttccacatgcagtcggtgaaatgccttaagtgtcaggaacagaagcgggcagtgctgccgtgccaacacgctgcgctgtgtgagctctgcgctgagggcagcgagtgccccatctgccagcctggccgggcccacaccctccagtcgtgaccctgcaggcctggcccagcctggcccagatcttctcacctaggactttttaaagtatatatatatatatgaatatatatatatatgtgtatgtatgtatgtatatgtatatgattatgtatatgtatacatttccgtatgtatgtatatgtatacatttccgtatgtgtgcaggtatgcgtggtggtgtggacagtgtctgtgtgtatatctgtacatagatatagacacacactttaaaagacttaccaagcactttttaaaagaagaaactattttgcagtcctcccctacccactccctgcccttcccactgcagagatgacatcccctcttctcccactggccttttggcagagaatctggttctgtctcttttttaatgtaggaactaactatttttaacttcttcctggggcctgagcagggaagggtgggactggaaggcactaaggggaagggagaagccctcagggcaggccctgctccccctacctccttgccagggcaagggtggagtgtggaagacgtgggtcccccagagcaggcctggcccccagctgtgagggcctcagggaggcccgagggggagtgctgggggtctcagctggcttagctcctaagtttaccaaatgttaatttagtcttggggagaacagcaagggctggaggccagtgctgcagggccagccccactcctgacacctgggcccttgaagctccttgaggggcaaggcccaggagttccagccctcaggttcctgagggtccaccctcagtccttccccccgccgcccctccccggactccccacaagagcctccctggccccagggccgcctaccaggctggtactcattctatgaccaccgcccccaaccagctgcccccagctctccctgccccctcccctctctggcagctagcagggcaattggcggggaggagtgcggactgaggactgaggaccaagggggcccaggccctgccctcctacccggaggggctccgtttgcattccttggtgctctctgagtgcagctggtgtcccgccctgttctgggcggacgcctgtgtgcgtgtgtgtgtgcctgtccagtgtatattgtgtcttagcttccattttaaaaattgttctgtacagagagagatgcagcaggggcgggagggcagagtgggcggaggggagcagccgcacccccagcaccgggtgtctgcggtaggaacaagagggctgagagggtctggtcctggcccaggctcccccttgggctcagcacgaaagggctttcaatgaattaagtgaaaactttttccttttttacaaaaatgcaaaaatcaacaaagctccaaacctattggaaataaaatatgaacttgcagtggtagcttgtttacatgggggtgagggggagtgggtcccaaaagagggcctctgaactatgaggtgggccaggagccttgcctcagccatggaaacggctgctgcccacacccctgagctgtggtaaggcagctggagagggctggaaacttcctgggcccatcaggccccaagacagttcaagtgctctccgacctaggcctagcggttgatgacacagggacccttagccttggacacagaggccccccaggccctaggactctttagggctgtgtggtcagcggtgactggcaatagggcccgtaactgtttctcagaggaacagtgtcttcccaactgggcatggtggcgcatgcctgtggtcccagctactagggaggctgaggtgggaggatcacttgagcccaggaggtcgaggcggcagtgagccatgattgcacagctgcctccagcttgggtgacagagtgagatcccatctcaaaaacaaaaacaggccgaggcgggcagatcacttgaggtcaggagttcgagaccagcctggccaaaatggtgaaaccccgtctctactaaaaaaaaaaaaaatacaaaaattagccaggtgtggtggcacatgcctgtagttccagctactcaggaggctgaggcaggaggatcctttgaacccgggacgcagaggttgcagtgagctgagattgccccattgcactccagctgggcgacagagtgagactccatcacaaaaacaaaaaacccagtgccttcccattgggatgatttgctggtaggacccagaggaagtcctgccttctgccttcttcaccctaccctgcccctgagggatgaggggctgaggcctaagaggtacgtcctccctcccacctcctcaactaggctgtgcggtggggggtgagaaaacaccctggtgggatcctctttgcatggtctcgggccttggatgtcatctcagctaacctcgactcctgtcctcattttgtgcagactcagaggttccgacatggaaccagggtcacacagctaggatgacgtgatgaccaggcctcaggttctgacaccccccaggcaggggagggacccagctcctctacgccctactgtctcaagagcagcccctcagcctcaacctgcacccctgggaggcccctgctcactgtgctcccccgaggaacgggtccctgtcctgggtgtcaccacaggaactggtatgcctggtaaagcaatttattcaaagcccacggccaaaaatcaccctagccctgcctctgcctcagttatttccacacctacccccctgctttgtagctaccccaaggtggcggtagctcaaagtcccctgagggctggggaggaagctacccggcctggctcgcattccaggccccactgtaggccaaaggcatattttaagaggacaatggatttgtttttattaatttttttgctaagaaagtttctaggtggcaggtgctgtccggggagggggcgtgcgcagcagacacagcagccaaactgtcctttctgcttccgtctgtctgtgccagccctgccgcctgccagctcttgctccctcagagccagaaggttcttggctccaggcttcctggcctggatgctggcagcccctggggagaggacccaggccccctctagtaatggccaccaccctccccccagggcagctggagcctcatctttggcagggtcccctctcccttttccaggagactctgtgcctgtagccctggtcccagtgaacctggcccccaccccagtggctggaacaggaaggccaggaggcagatgggccagggccaggagacagatggcccaatcccctgcccaccacagcagcttttctgagaggcgggcaggggcagggtttgctccccctggtgctgggatgtggtagagacattgcagccagggctggaggcagggaggcgggagtagagatgtcgctgctgagcccccatcaccatgggaggcaggggaggtctgcactctgggcactccgcatgctggggctccccaagtgttaggccaggctggagggccgcgatgtggcggggaagccccagaccctacaggaaagcccttgcaagtccccaccggggacccagccccaccgcaaacctctacggctacggtgccggccgcaaggcatgctgggaggcctgcttggcccggtgccgccgcagcctcacaaagacctgggcttctcggtcacccttccggccctccagcagctgcaggattgggtcccctgcggagagaggggtttgggggtcagatgccaggggagagggcagtgcctggtggtggcagagaagagtgtgtgggggggtacacaacactgctccatctccccaacaacctggaaggaaacaagtgacagacccgcgccagcccagcccaggaggtggtctgacagacgcatccggtcgggtcgcgtaacagacagagtgctgctgggacactgtcctgactgcagcgaggggctgagatgtgcctgaggtttgactattacctttttatacgagaacctaaagctagcaagttaaccttttcatgcctcggtttactcatctgtaaaagagtgctaatatctgcttcgttggctggaatgcataaagtgcttagcacttgctcataataagtgcacaagcatcagaccgttgctggtatcaaaaatgctctgcagggaagcggccccgccgagtgagatccaggcccttctccccagttaaacttcttggtgacttccccatgcaaggagagtcacgttacacttagcttaaagttcactggtctcttgattagaccgagagatgggccgtggctgtcccactggctcccgtctccagggaagctgttctccgaccctggcatcacctctctggggcccctgcctgagctttacaggctcccgtccccgcaccaccctgccctgggctcaggcctaccgttgggtgcggggtacgtgaggggcaggcgggtctgaggcacctcaccaggctcctcagagccactcagcccgggcacctcacgcagcggcaggaaggcctcgccttccaggtcgtcggcccccagcgtgtcgtagtccagcacggtgagcaggaggcatgccccagccttgcggcacggctcagcaggcaccaggctgcggggagagtcagggctctgctgccagccccagcacagccaccccagcctcggcacatgggttcacccacttggtgttgggaaccagccagggtttggactgcaaagccagctctcagcctggcacctctcagccatgtggtgcaatgcctgctctgaccgtgggctgatgctttaaaccagcggtcctgtgttccctgttcacctgtgctgaggaactaggagcaggttactgagaacctcagagacaggacccttccctggaagtccctaagttaaacacctgggagtccaccccttcccccaagggaagcaaacttttttttctgagacggagtcttgctctgtcacctaggctggagtgcagtggcgccatcttggctcactacaacctccgcctcccgggttcaagtggttctcctgcctcagcctcccgagtagctgggactgcaggcgtgtcccaccacacccagctaattttttgtttttagtagagacggggtttcaccatgttagccaggatggtcttgatctcctgacctcgtgatccgcccgccttggcctcccaaagtgctgagattacaggcatgagccaccacgcctggccctctttttttttttttttttttttgagatggagtctcactctgtcgcccaggctggagtgcagtggcaccatctcagcagcctctgcctcctgggttaagcaattctcctgcctcagcctcccgagtagctgagagtacaggtacccaccatcatgcccggctaattttgtatttttagtagagactgttggccaggctggtcttgaactcctgacctcaagtgatccgcctgcctcggcctcccaaagtgctgtgatgacaggtgtgagccaccacatccagctgcaaactcttgtcccagatgccccatcccttgggcccaaatgtggccatctcaggggagccccttggccccagccaggaggagcaggcctgagggagcccagtggggagagatgaggggagggactgggagaagaacgggacccactcacaattcaaaggtctcatcaaacaatgggtgaaggtccttcttgtgcttctgggtctcccgggcggccagctcagggaactcatgcctgggctccaaggtcagctggacaaaggggtcgctggagcctggtaagtggccggggagtgtgcgtcagctgagggtctcccaggcaccccaccccagcagctatgctctgctcagcggcactgacccctcctggtaactggaggaaatgcacccagagctcctgcagggtgagcgaagcccccagggtcgctgagacaggagggccaggacgggaccatggagagtggccaaaggcagcctccactcaccattggagtccaggggcagcaggctggaggcgctgagcagctccacacgcagcttctgctcagaggcgcggtaggaggccttgactgtcacagcccccagctcctcagaggtggtttctgcctggggtggggagcaggggcagggtcagcagggtcacagcgggagcggggtgctccagggcctgcagagggcgcagtgcgagggaggggcctcacctgctgctggattcggctgcagaagtacttccggatgagttcccggctggaggccgcctgcagctccaggtccctctgcagagcctgggaacacatacagctgaggatccacctggactgcacgcccaaccacagcccaggcctgccctccaggagctcactgtcaagggtaacatgtccgtttgaaatggaaagtattgggtcatgggacaacgggctggggccaccctcaggccagacagacagcaggagaggcacagacagggctggcttcacaggcgtgcttccccgaccccaccccccatgcgggcacacagggcccctgtgcttaggaggacccaggcttggtttcaggttctgtcgtcaccgttctaaaatttgtaataacttttgaataaggggcccagtttttcattttgtactgggccccataaattatgtagccgaccctggacataggtgagtgccaaaaggcaggctccccagacttcctacggggaagctcacccaaagcccctacctggaaggtggcagtgtgcagggccttgggtggcaggccacagccctcagcgtggaagcagatctccaggttctgggggagatatcagaggtgaccccaggcaccctcccaccagggttatcattgctgtgaccggttctgttacctgcagggcaatcttcagcctgttggaagccagggatgagctgcgctgggaggcggccgcctccaccagcactgtgagtgtgtgggtccagagcagggtcaggaggctggggcggggccggagggatgcggacacagcacggcagggcggtggcggaggaggaagcaaagacgctcttgagaaaggggcggcctcagtgacccagccccaccccagctcctcccacccccaacctccccctccgcctcccaccccaggtgaggctggggagagggtgggtacaggaccagcaaggggcaggtgggatcagtcctatccaacacacctctcaacctcagtgaggaaccctccccagcacactaacggaatgcacaaacaaggctggagacagggaggag[221 bp omitted]gaggcaggagaatcgcttgaacccaggaggcggaggttgcagtgagccaagattgcaccactgcactctggcctggcaacagagcaagactccatctcaaaaaaacaattagccaggcataatggcatgcacctgtagtcccagttactcagcag[144 bp omitted]gccgggctccgaggggccctggcttatacctctgggggtggaacagaactctaggagggctgcggcctcttcagggcccagattccacagggaggtggggcgctgtcatcatcatcgtcactaccgctaatagtcactgaccacttcctttgtactgacaccacgctcagcacctcacatgacccatttaatcctcaacagaagccagaactactctcatctgcaccgggaacttgcccaaggctgctaagcagtgatgaagccggagtctgaacccaggtggtccagagcccatgtgctggactccaccgcctgttgcctggcatgctgggtccctgctataagacaccctagctagaagttctccctgcaccgtgggcagggaccacctgtaacctaatgggggcagaggagcaggcagggaggccctgaagacaggcctgggactaaaggagaaaggacaggtagattttggctcagcctaaggaagaactcaaagcactcagagctaggcagcaggaaatggggaggcctgagaagtggcaagctccccgtccctgcagcgagccttagcagagcctgttgcacccataagggaggtcaccaaagggattcacctccacccctcagaacggatgctgaggcccaggaaagaggggccgtgggaggagagggggaggtggcgagcgcgcccagggcaggggctgctacacccctcagaacggatgctggggcccaggaaggaggggccgtgggaggagagggggaggtggcgagcgcgcccagggcaggggctgctacagacctgctgaagttctcctgcaccaagttggtgttcatgtagcaaagctccacctccaggaacttcatcaggggcagaatggcctggggagggagatggggagcaggtgtggctccggcccatgttggccccacccccatccccttcccctgacctggagggaggaaacagggctgggaaccgttctgtgagagcagtttgtagtgtctgtaagaggccggcctgcccacctctctgccttcccctctccgttgctcagcctgtcccagccacactggcctcctctacagccctggaaccttccaggcatggtcctgcctcagggtctctgcccttgccgttccctctgcctggaatgctcctcccctagaacttctcatgcctcctccccttgcttcccgtaggtcttcgctcagttgtcacggccttccctggccaccatctaaaaatacaaccctctgacacttctcagccgcttctctgttttaaattttctctgtagacttatcattatctagcacactgcatgtgtgtgcacgcgcatacacgcctgtgcatagagttaacagctataactatcactatagttatggatactcactatgtagctcttttttcacctccactactagaacgtgggctccaggaaagcaggtattttgtcatattgttcactgacctatccccagtgcttaaatcaatgcataggacaaagtggggacctaataaatagttggtgaatgaatgaatatccttctacccgccagtcgaaggtgtgcatcatgatatgcccccacttacaggtcagctggcttgtgtgaacaggacggcaaagctaggaggcagctgagaaggatgtgcaccctggcctgtttggctgcaaagtctaagccgtccccaactgcagccccctcattgactgtcagtgctgggacagccagtggagtgacccaacccgttcctgtgagcatcccaggaggaaactgaggcccagggagagaacatgctttgcctggtctgggggacttatctttgacaccaaggccttcaatgaccccagatctacagagctggcagggtggtgaaggccagcaggcagaagggccacttacatcctcaggcaggacagactccctgacgcccaccagtttctggatgtgcttggcgatgcccacctccaactggagacacaaaacggaagaaggagggaggtcagggcatgagtcggggatggaagagttccttagggcctgagtttagacgcacgaaggggtcagggttggaccttggcccaggtgctgctggagccaggtaggctgaagacgggatgggatggggtgactgtgcggtcggacaaggtacctgctcggccagggtgcggacgccagtgcggatctcatggcccagcccggccagcgcgctctgcagctgggcatgcagcgtgttctgcagctgcccctgctccagcacggcccctacccgctgctccagggcctcccatgccagctgggcgggcaacttgccgatcaccagccgcagctgctccatgtcattcaccaccacacacagctgggacagagatgcagagcttcctgaactgtgcccaggctggtccccacacccagctagactcccagccccagctctggccttaccatgttggctgcctggccttggtccttctggcctgaagagagctcgcgggcccgggcctttataaggctgcagtacaccagggccaggcgacaggtgtcctagggtggggttggacagagggaactgatccatgggtggggcatccaggaagggcaggtgggagggcatgggaatttcagcgacttgggggatttagaatacaggccttgggaggctgcctgggtgagagcacgggagaaacggtgggtggtagtgtggctgttctagaaagagggggaaggacacgtggaagatgccgcacctccacaaacttgacggtaatcatgaaggcctcctctgggtctggccagtccagctgccgggcagtgtggctgatctgggcaaagcaggtggatagatccaccgctgatgtgctgtgcttggtcagttcacccaggggcaccagctgggggaagaaaggaggactcaggatactgccaaatccacccccttccctccttccttcattcatagagcagctaccatcaccaggcacagagctgggcagggagcttcacaagagacaagcacggctccgcccagacccccaggctgcaggatctcaggcaaagtgaagccacagccccaaggatatccagaggcagcgttttgcacaaaactggactcaagtgcacccaaaagggatgttcagagcgggttactggcttttactacgctttggaggtccaggcagaacccaagcctcacccccaaaccggggccccgccccctgccctggccacgcccccacctcatccatctgcacagcgcgctgcacccgcgccagggcctcgttgtacgtcttctgcagccaggaggggatggccggctggaaccagcggtggaaattatccagggccaggactccatccctggggattgccggggctcagcgtcgggaaggctggggccaccatggaccctggggcctcgtccaccctcccctcccctgtgcccctgcagccgcccacaattggcctgctgcccacctctctgaggagctcatgcgcagctggcagagctccttgaggctgatgtagagctggaacagactctcgcccatctctggggacactacatcacccacaaccgtcgtgtggtcctgcacccgcttggccacctgcaaaggaaaggtgtggagggcggggcccacagctctgttggagggcatgccctagagacgggggagggactcaccagccactgcagctcccggaaagccatggagaagaggtggatcttgagggtactggaggaaaggcagcaggtgtcacccagtggcatacaccagggtccccatggttccggctctgaggcaatgccccactacctcccgacctggctatctgctcacttgtggaagatcttgtcccatgtgcgctggcactggtgcaggtcgccaatgacatcctgtaccaggcccagcaaggccttgcctgcctccgggatgccctgcagagacagaggtgggctgggcagggctgccagaggcaggcaccaccccccgtgaccccctgccctcccccttgcccagcccctcacctgcaccatgggttgatggtgctgctgcttcaggtggaaccattcagtggtgccagtctgtcgacaaagaggcagtgagcagggagggactgccaggcccaggcgctggtctcccccatccccagcgcgagtaccatacctgcagggcctcagtcaccagctggggcaatggggcggtgttggggcacagttctccaaaggccttcatcttgcacatctgtaccaggaccctgcaagatggaaagagctgtgtcgaaagtgcctgctgccccacactgcactcactcctccaacaattctcccactcctgcaggcaccccagctgctccctcatccctgaccccaccgaggaagaggaaggcagccactgacctgagaagagactgcagccgggctggggagtccgagacagagagggggaagacagagcggaacctccggatgagggagaggccgtaggtcagcagggagctgaatgaggcggccagctcctcctgctgaagagccaggagatgctttaggggcctagacagctgctgctgctcccctgccccttccctgagccctgcctgctcagtgccccttgccactgcatgcctacctgttctgccttgagccgaccctggatccactggtactcgatgctggtgatggggtgcaggaggcagctgctggggaactccaggctctggtagaggcggctgtaggccagccactgcctgcaggggacaggaagccctcagctggacagggaggaggaaattgccttcccctgttcacccggcctcaggtggggggaatcgcctcccatccaccagtacaggctgaaaactagtggctcaacaggacatgcaggattgtttttgttttgtgtttttttttttgagatgtagtctcactccgtcacccaggctggagtgcagtggcgtgatctcggctcactgcaacctgcgcctcctgggttcaagcgattctccagcctcagcctcccaagtagctgggactacaggcatgtaccaccatgcccagctaaattttttatttttagtagagatggggtttcaccatgttggccaggctggtctcgaacacctgacctcaagtgatccacccgcctcggcctcccaaagttctgggattacagacatgagtcactgtgaccagccaggattttttttctttgtttccatagatgcttttcaaattgcccagattgagatctttgtgattttaaaacttcaggatttcttgctgtttttgaaaaattggattagctgggcacagtggctcacacctgtaatcccaggacttttggaggccgaggcgggtggatcacctgaggtcaggagtttgagaccagcctggccaacatagtgaaaccccatctctaccaaaaatacaaaatttagccaggtgtgatggcaggcacctgtagtcccagctacttgggaggctgagacaagagaatcacttgaacctgggaggcagaagttgcagtgagctgagattgtgccatggcactccagcctgggcgacaagagggaaactccagctcaaaaaaaaaaaagaaaagaaaagaaaaataggatctatgaacctgagccttcgtgcacatgtggcaagcatcagtgagaacttcctttcagatggtttggggggatatcacacaaacgaggtcccgtgggagggcagaggatgggggagaggagcagcctggggacaggccgaagtccctattggacactgcagccacctgcattactgtgcttgggccctgcaggcaaaccaggtccctccccatctggtgcctgctccagtctccagccgcaccaccattccacccttgtctccgaatcacccacctgcctgaggtcctagcagtacacaagctgaccccagcccagaaatgcactcccctgggctccctccgcctcccactcagactccaagtcacagcccaggcctgagtcggcatcctgctcctgttcctcccctggccagcacttggctgtgtcccatctctttttttttttttttgagacagagcctcgctgtgtcgcccaggctggagtgcagtggtgtgatctcaggtcactgcaacctccacctcccgggttcaagtgattctcgtgcctcaccctcccgagtagctgggattacagacatgcgcccccacacctgactaatttttctatattttgtagagacaggatttcaccatgttggccaggctggtctcaaactcctgacttcaagtgatctgcctgtctcggcctcccaaagtgctgggattccaggcgcgagccaccgtgcccggccggctatgtcccatctctgccctactcacatgcactggaatggctgtgaccccctgtgccctccccggcattcctaggacttgacgtgagttgccctcaacatagatttgtccttatcagcgcgtagttttgctgagttgaaggctatggcattgggaagcggggctggggttagggaccgggtccaaattcaaatgcccaggactcaggagacgaaagcaactgaagtgggcccaatggcagccatgatgggcagaggcacacacatcgctccgctctgtccactcaaaaaagcagcaaaggctgggcgcggtg[131 bp omitted]gtggctggcgcctgtagtcccagctactcgggaggctgaggcaggagaatggcgtgaacccaggaggcggagcctgcagtgagccaagatcgtgccactgcactccggcctgggcgaaagagcaagactctgtctcaaaaaaaaaaagcagcaaaatggctcggtgcagtggctcatgcctataatctcagcactttgagaggccaaggcaggcagatcacctgaggtcgggagttggagaccagcttgaccaacatggagaaaccccgtctctactaaaaatacaaagttagctgggcgtggtggcgcatgcctgtaatcccagctactcgggaggctgaggcaggagaatcacttgaacctggaaggcagaggttgcatgcagtgagtcaagattgcaccattccactccagcctgggcaacaagggtgaaactccgtttcaaaaaaaaaaaaaaaaagcagcaaaatgatgaccctgcagttccagcacttgtgtttcatgagaagctggagatctggatggtatgtcaaatctccagatagctttttctaatattttttggaaatgaggtctcactctgtgatccgggcaggagtgttggtgtgatcatagctcactgcagccttgaaatcctgggctcaagtgatcctcctgcctcagcctcccaaagtcctgggattacaggagtgagccaccgcatcagccgaatctctagactttttaaaattggcaactgattcaaaacttaaaacacacattttgggccaaagggaactctgctgagaattacactttgggctaccggcttggaggagggcagggggcgtggggggctggtggctcaggggttctgcccagggctgtgtactcacgccatggactggtggaagtcggataggtccttctgtgtggcgtgcagaaagaggacggtggcagcctggggactcagcgacccgtcccaggaggtgcttcccgcctgaggggagcaggtggaggagtgtcaggacctgaagggcagccccggctgcgcccagccccaggagggcaatacctcgtgctgggtgacctcgtgggacacaagctgctgcaggaggtggaggtgcacggtgtagctcggctgcgagcggctggccgaagtggctctctgcaatgaggcctctgtgagcagacagggcctcacactgggtgcagccagccccgcaacccagcagaccgccgcaagagctgggcatggccactggcccagtacccgacctacccgcttatggatgagttggaactggaggtggcactggcctcggtctgggtaggtctcagtgcggggttccagggggtaccactggtcctctcggcagcgcaggtcctgacaggcggggatgcccagcccgtgagcgtcagaacctcatagagtcggggcagcggaggcgacaggaggtggaccccaggctcagctttgtgaggacacagagcctctccccagaacccctcccaaccccctccctctgcctcgctcctgggcccctttcctcatcctcctcacctgcagcctcagaaccacgttccccagaaagtcgtcctggcctttgtccttccgggcctctttaaagatcctgcgtcaggcagggtcccataagggggacgcagcaagggtcggaagggattaggctggaatccacccccggccgcagccacctggaccccaaaggagcctgcaccccagcatccagtgtgcatgttgggggatggagggcaaaaggagccccaaccccttccctgtgagccctgcaacacgaacctgcgaagcccatgcagatccgtgagctccccaagcttctgtcggacagactccacagtgtccaggtccctggcaggacagaggtttgagaaggaagcagagagagtgcctacgacctcttccaggaggaggttccgcctctctcaccccagatcccttcccttcccatccctaggggcaggccaggtcactcaccacatgtccagatgaaagctcgcattggtgatgtcctcaaactccctgtatggagaaaagggcgtggttgagggccctggagggtggatgcccccagacgaagcagtaagtgaccacagcccagagccatggagttgtagcctatccctgccaaacttccctcctcccagccgcatccctttttttttttttttttttttttttgagatggagtctagttctgtcccccaggctggaggagtgcagtggcaggatctaactcactgcaacctctgcctcctgggttcaagcaattttcctgcctc[132 bp omitted]aggcctcccaaagtgctgggattacaagcgtgagccaccgcgcccagcctttttttttttttttttgagacagagtctcactctgtcacccaggctggagtgcagtggcgtgatctcggctcactgcaacctccgcctcccgggttcaagtgattctcctgcctcagcctcttaagtagctgggattacaggcatgcacctccacgcccggctaatttttgtacttttaggagaggtgggccttcattgtgttggccaggctggtctcaaactcctgacctcaggtgatccacctgcctcggcctcccaaaagtgctgggattacaggcatgagtccctgcgcctggcccccactaatttttttttttttttttgagacagagtgtcgctctgtcaccaggctggagtgcagtggtgctatctcggctcactgcaacctccgcctcccaggttcaagcgattcccctgcctcagccttccgagtagctgggactacaggcgcctgccaccacgcccggctaattttttgtattttagtagagacggggtttcaccgtgttagccaggatggtctcaatctcctgacctcatgatctgccctcctcagcctcccaaaatgctgggattataggcgtgagccaccacgcccggccttttttgtatttttagtagagatggggttttgccatgttggccaggctggtctcagtctcctggcctcccaaagtgctgggattacaggtgggaaccactgcacccatccctgcctcctttcaggtacagcttcaggcacccccagactcacccacaagggcctgaccctccttgccccatcagcacgtgtggcattgatcttgttctgtcccatctgacctactgtccacctaacgtgcctggagatgggcttctcctctagtctttgcccagggccaaaccccctcccctgagccaggacgacctactcatctcattgtctggggcagaccctgctacccaggaaagacctggatagagtgggggctggagcacggccacgtacaggatgaaggtctcgtcccagacggggttgagtgtctgggtgatgacctgcgtgcggtgggtctcctcctcggggatggtgtgcctcaccacagccttctgccgatgccgggacccggggctgccccctggcacacctaccccctgctcaatgcccagcaggcagtaggggtcgctgaaccctgtggaggagtggggaagacgaggcagccagggagtcggctgggtccctgggagaggccctcatcacccccgcccggggctgagcctcctccgggggagagggaaggggaccagcagcatggggggccagcgctacagggcttcttggaagtgggtgctcccgccaagagtcctgggccaggctgtgatgggagaggaaggagccaggaagaagccccttggggaccccaccccatgctcaccactgacatctttgcccagaatgcccttggcctgtttcactgttgccttcagacaaaatattggcttctggagggacaggagggatggcctgagtccctgagggggctgggcttcccaggcccctccttgcccagggggaccctggccccaggttacctcaagctccctgacccgctgcagtgtctgctggtgctcctcgggctccacgtggaaggcctggtggggaggcaggcgggtgggtggctgggggcaccagacagggcagctgcaggaaggggggtggggtgggagccgggctcacctcctgcaggtatcgcagcagctcagaggcctccgtcacatggttgggctcaggatgacccaggcggtgcaagacagtgtagagtgcgtcctcgtagagcagggcccgctaagacacacggggtcaccttggggaccccaccagccacccctggcaccaacacctctcgccatgggcaggacaagggcggcttgtgcagcggagggagttgagacccaggagtcccctccccaccgcaagttgcttgctgccatcagcgtcggccggcaggaggacacacagccgccctccccacctctctgcaccccagcactctgactcttacctgctcgggggagaagtggtgggatggaggctggatctgcagagcaaggtggaaaggcagtgtcccgggaggcccagagcaggctcagatggacaggaatggctcctctgaggcctgatccaggccaagggtatgggggccccagcaccccggcctccagccccagtgatgccccgcacctgttcccccagcaggcctcctggaggtccgtccctgggcccgccgtggctgaggtccatgggtgcccagcagcgcgagccctccgcacccgcaccccacctccctcccttccccagaggaaacagctctgcttatcagtggcggctgctcctcacccagcagcggaagtgaggctcggcagcggaggtgaggggggtgccacgtcggcctgggggtctgctgctccccgaacagctcaccccacagcagggacacccccacctaatggagtcggctcttctgaagctggaggagtaggggatggggtcaggccaaccgggagggaggggttctgagagcctcagaccacagggcctgaggcccacagtggcccagagtccatctggcagcccctgctctgctggcccagggggctctccccagggtggagtaggcaggggagggtcgctggtccccagtcccagccttcgagaggtggggccagacagcagggcacccgtacccgagaccacagtgctccccaaggccagctctctccccagtgaggtcactcctacctccggggccatttggggcgggggatcctgtagatctctgactctgcggcgccttatcttgatggcctggcgcaagaagggagggcgctgctgcggatgggagaggagtgtcgccatggtggccttctctgcccttccctgtccgctggtgctgggtgaagacagcgaagccacaggattatgcaaagagcctggggctgccaccctctgtcaggggaagttttagggagggtggctgggagggacggaagggtgagggtttcaccgcttcggagaggcagtctcccaggccccctgcaccttccccagctgggatccctacaggaccctcctctggctggagcagaaggtggaccccgtgggcaggcctggccccgccccaccctcctacagaggccctgggaaggggacaacgctctcagcagggggcgggggggcccagaacaggcgggcagcatcctgccccatccatgtgctgtgcccaggctgggctgaaccctgagagaagctgacctgggcccgggggggttctcaccccacttcctcgagtgcgtccagacgtggggcggggcggggtggggtggggtgtggtggcgcccagggtgggggctcccaagaggcgtctccctggaggacagccagttgctcagcctgcctggccccacaggtgacattccttggagatgacggggccaagctgtgctgggcagggacagccctgtgcccctgcccccaccttggcagtcaggacagtgctcccttcagacacccttgaagggggcttagccaagtcccagagagctctgggccaggctggccaggaggaggaggcagaggggctgctgcccgatctctcctgaggacagacttggctcccgggggacaggaaaatgcgcctcagcatggggctttcctagagctctgtggcctgcccaccctgtgcccagtgctgggctgggggacttgcgggcgtgtgggcctggtcacggcctttggccatttcccaccctcctgtcccttcaagttcacagcagggcacgtgacgtgggtggtggcaagccggcttggctacctcagtgtccctgtcacaggtcctgacgtgctccagggctgactcggcctcctccctccagcaaccaggacttaggccagggctgccattcctcgaggagccagcaggggacaaggtggcagccccaactcctcccttcaaggccaactctgggccacatccacctctgtcccagccaggccctggggactcagtgggggagggacacagctgctgagcgacaaccgttaagaaccagctccagaggccagagctgtcttggggaccagacaggctggctgggccgtgagaatggggatcctcccatgggagggaaccgtcccagaagtctccagggccctcagcggccagacggctctccttccggaagagacccccgggtcaccacacgcagagccagaaagggtccagttatttcatttttactatttcacattttcagcaaacaaatcgaggtgcaaacagggtttatttcacattaatatattaactggattttttgtcaaataaatagggaattctctttaaataaccatctcctcacttcatggccagtccagggacaaacaagagtgaatgttagcgcatccaggggcacaaagcttaaggggaagaagcaggctggggggctggtggcaggtcccggccagcacacagggtcaggggcccttgttcccggccccacccagcagccaccaagtggacagacatgcattctctggttccagtcaggaagctccttctagaaggaagtgagaggtgagggaaagcaaattccagaaacaccagcaaaaggcagaagggcttcctcccagcctcggcggccctgccccgacgccacccaagccctggaagctcattttacagcttcaaaagtcacacagggtggcaacaacatgacccaggacagggaagggaaggaagggtggcgggggctgcagctggaccctggctgagtggaatgcgggcgcggtggccttctgagaccagcacagaccagcagagggaatgtgagcagggtctggcagggcccgggaagacacctggctggtctgaagtggctcatgaggctgagtgtagcagtgggtgccagactgagggagctggactgcggtggaggaggtggccagagagtcccttcgaggggagaagctgagagtgaaacaggaacaggggatgctccgtgctcccagaagagccccagacggtgagggaggtacgctgggcagcactgtgggctccgggctggcatgggaagctgggcggcacctctcccgaggccgggggccctaatgtcccacaatgctagttcctggtaattgtttatgatcagacctggagggagaacaaggcgccccctcccctccccaagccccagcacagccccgatgggaggggtagggtagagagatgagggtgggaggcagggaggcaggagggcctactgggtcttcttatcttccggtgggtagtagggaggtggcggcggctggctctaaagaagggagaaaggagagacttgcattagaaggtttaaaacatggtgcggtcatccccctgcggctcccagcatctgcggctgtggggctgcaccggcactgccaagccctctcaccgtgggcatgtagacgttgtgaggattgcctgggttgtaataggcgctggcggctgcttctgcggccttggcttcggctgtgagagcaaacacacctggtgtcggtgacaagttctcctccccctgagctcagctaagagaccccgggcccccatggctcggggcagctggtgctgggggtccagttccaccaatgagagcagcaggtgaggtttcctgagcacatgccacgcgctggcacggtcctttccaggcccatcgcatgtctcacctcatctaatccttgagccaatgccccaggtgccactgtgaccgaccagctgagtgtagatgagaggatcgagaggcacacagggtgaccttccccgcccagggcacatggatagctaagggatgggggtggggccagaatctagctccgctccaccaggccacagccctgctgggcccctggggtagtccaggggtcatccatcatctgcggctctcagcagtctctggccattctgaggctctctgtgcgacatcggggaggagagggctggtcccgaagggctgccagcacccaagggccctcacctgcaggagtggaggggacatcggggccgctgaccggaggttccatgggcccagggtagggcggtggtgggggctgcacgtatcccatggccccgtccatcatggggggtcctggatagaactctgctcggtgagagagtaacaaggacatggtgagcacccggctgcggccccctcccgggtgaggggggcctctccagctccttcgttggtcctgaagcagctcaaggaataaagtctccctggcctggggggagcctgggtaggtgggctcatgaggggagtgggggcagcaaaggacacactcaccaggtgggggcggtggataggggtagccaggagggcaggggtacattccattggcgactggcgggggatagacataggccccgctgggcatgtaagagtagccataggctccactggggacttcacctctggaggctacgagtacaaggggaaagagaaatgagcgtggcctgccttggggcggggagagggcagccccgctgcctgcagatgggagctactgggtctcaggaatgtgccccgcagacatcctctgtccatcccactccaccctccacccatactcggggggccaccttggtcagggatgagagaggacgggagaggtcagagccaggggaaggcaagggaggtcaagggcaaggctggagggtggacagaggccgggagggaggctcagggctggggtaggagtgagctggcggaggatgtctgctggcccatccctcggtcattttcaatggctgcggaaccgcagtcgaatggttggtttagtgtttgttttatgaggccatagtaaagtgtccttgagtccaaacagctttgtcaaaacgtcatccacctgccccaggcagggaaacgcagtctctgaggtacaggacagagctgatgccaatgacagctttccttcccaactcctaggcctggtcagcctggtgcccaaacacttacctcttgagttcttgaaaaagcaaaacgaaaaggaagcaaactcataccaaacccctacatgtttagtgtgtctttagcccctaatcttcggagcctggataccttgagatgccacctggagcatccgctgtccgaactcaatggcgccccctgccgtgaaagtcaacttgtaggaagcagagccttcccagccacctgaaaggggaaggacagtgaataaacagcacaggaaaagaaaacttatgcccaaagagatggctgttttcctctccaggacttcatccaacgcccgggaggcctgcgggggctgggcctgcactgtgatggggacttcctggtgccatggtttccagcctgctgcctgcataggagccagcactgcagcctggcctggccctgctgtactcgcttccccctttggaacaatggcctctccttcctggaacaagcctgtcctcccacccttggcccaatatgtacacgggtgccaaggccacatcaaggtttctctccgcccccagtcaagcactcggcagcttcacaggaacaagcccactcagcaacagccgaccttaaaattcagagcagacctctcgtcctaagggggcccaaggacagactccggcccctctagcctggcttctgcccaaagggggaccaagagtgtctcaatagcaagggcgggcctggctgggtgtcaaggggaaggcaagttcaatgcagaggtctctggggcctgccaaaaagccagccccaaagcagggtgactctggcttcccagaggcagctgcctcttcctggctctcatgaaaaggcccctctcaagaacctgatgcagctccttcctgagtctaaaatttgtatgcgctcgccaagttgcactaagcatcttgactcagtccgcaggcttctgcagacttcacgctctgaaaagctgatctgagctgctgtctttcatgccagcattttccccacctcttggcaatcaaaccccaccagctggcagcccagagctgggaagaggtcatggctagggcgataagggtctgaaggggacgcccccacggcggcagtcagaggttcccaggacacctccctgcaggccccatgcgtgtccctgagttcccatcacctacctcccgcttccgccttcactgttcccttgatgtagtttgcaccaaatacgggctgcttgatctcacagtctttcatgagataaaatggcatcatgaaggactgcatggcatccttgcccttggacagaaagatgacctgcagggagagagggtgaggccatcagtactagaagcacagcccacgctgccatgcttcccgcctgcttcctgggagtgacgaatcctctcccagtgccagggtccagcagccccatggctctctctgtgccagacactcctggagagagctttggaaagggaaagggctcaccgcagcctggagaggccaagctcacgcacacgggagaaaaacgtgctggtcacagatagtatctatgagcagggcagactgctttgtcactgacgtggtggggtggtggcagtgttgcctaagtgaaggggcctacgaagctagggaaggacaggcagaggcaaggcagggatgggttcctgaaagaggggggtctccagcctgaactctccagaactgagaatgatggtgcagtaggtcgctagctcccattgaggggggctataaacagcaacaagagctctcctggagcctgtgcctggagaaacccttgggttttattttttcttttcttttctttttttttttttgagatggagtcttactctgttgcctgggctggagtgcagtggcgcgatcttggctcgctgcaagctccgcctcccgggttcacgccattctcctgcctcagcctcctgagtagctgggactacaggtgcccgccac[175 bp omitted]tctgtgactgaaggtgccaagttgagcctccagagatggggttttgagactctcctgtctttgtgaagtcatggagattaaaacttgaaaatgtgctcctcttcttccagctgtctttgagtctaagtcttttttttttaggcagggtctcactctgttgcccaggctagaatccagtggcatgatcccagctcactgcagcctcaacctctccaggctccagttattctccaccttacctctcgggtagctgagactagaggcatgtgccaccacacccagctaatttttgtattttttgtagagatggggttttgccatgttgcccaggctggtctcgaactcctgagttcaagtggcctgcctaccttggcctcccagagtgctgggattacaggcatgagcctccgcaccagcctgtctttgagtctaaatcttgagtagccacaggcagcaatccttttccaagaacatccatttgtatttctcaacctctcagagtccacgtgggtaactctcaggcagggcccattctgcagcctggcatttgtcattctgcggggtggtaccgggctctctgcccagtccggaggccgtgccatgcaactgtaccctgtttactggatttctcactctggatacacacagggcttcatgggctactctcacagaaaacaaaatattaataataatagtctggcctccaggcccaagtcatgccagcggctgcatccaactctatagagattttgcagcagcggctctggaattgacatgggttcactgcccagtggtcaggtcagttacacaaagagcctggtgattctggaatccaggagcatgtgacagagaaacaggcagagtgaagcactaacactcaccaggattcagaggccacctgactcatgaggctgaggcagacctgagactaagactcacgtcacctccaacagcaacaagcctctcaaccaactgccctgctgtgcaactcacccggtaaggggtaaggtagacagtgcctttcttggtccctttgaaggcttctggcacgttcttcatgtcattgaatgtgagttccacgtgatcataggacattaggatgctgtgatgagaaaagaggaaaagcctcaatgagacagtatggagacgcgacgtcacccagacactgggcctttctcccaagcagctgcccggcacgtcagctctcataacctctcaatagtgcggcattaaaactattcatagggctgggcgcggtggctcacgcccgtaatcccagcactttgggaggccgaggcgagcggatgacccctggtcaggagtttgagaccagcctggccaacatggtgaaaccccatctctactaaaaatacaaaaaaattagccaggcaccgtggcgggcacctgtaatcccagctagtcaggaggctgaggcgggagaatcgcttgaacccaggaggcagaggttgcagtgagctgagatggcgccactgaactccagcctgggcaacaagagagaagctctgtctcaaaaacaaataaataaataaagccattcatagggccaggcgcagtggcccacacctgtaatcccagcactttgggaggctgaggcgggtgaatcgcttgagcctaggagtttgagaccagcctgggcaacatggtgagacctcatctctacaaaaaaactaaaaaccaacaaaaaaacccattaatatagccatggaagaaatgagcaggttgggggttctgtaaaatttcccaaaccccgcttataaagcccccaaatgatcaacatggtagcagagctacagggctctgaagaggccatcatccctcaagcaagttagataatctggcttaactcttctattttctttattttttttttttttttttgagacggagtctcactctgtcacccaggctggcgtgcagtggcgtgatctcggctcactgcaagctccgcctcctgggttcatgccattctcctgcctc[134 bp omitted]ggcctcccaaagtgcagggattacaggcgtgagccactgcgcccggccaactcttctattttcttttaagtccttgtgatagatgttctgtttttgctggtttgtttttcaagcctaaaatataaacatgtctaagagatgactgtacagatcacaataggacgtccttcggggttcttttaaacctgggttcttaagcggggtttgcaggaaagtccatgaagcccttgagatgatcacgtatgtcatatgtgcatttttctgggaggagagtccacagctttcatcattgtcaaaggagttcacgacttgaagagtaacgttcactattttaattataattttttatttttttgagacggagtttcactcttgttgcccaggctgcagtgcaacatagcgtgatctcagctcactgcaacctccacctcctgcgttcaagcgattctcctgtctcagccttccaagtagctgggattacaggcatgcgccaccacgcctggctaattttttgtgtttagtagagacgaggttttaccatg[137 bp omitted]gttatagatacaactttttcagacagcaggctgaagcactttctaaaacagcaggctgaaggcacaccttacttagcaggactgagccctaagccaggtagaaggccgagcaggatagatacattcttgtctcagaaagttccacagagacagaaagaaaaacagtccccagagatgttgccaaatggcacgaaaagctggccaggcctgggaactgactcacacacagagatgcaacaaaacagtgtgaggtgtctctgattacatgataaaaaggttcacacggttctgtttgtcttctgcctccccccatatatcacaactttctctgactggggaagggtaagtgggaaacaactggtataagcaaaggaaaatggctgggcgcggtggctcactcctgtaatcccaatactttgggaggccgaggagggtggatcacgaggtcaggagttcgagaccagcctgcccaacatggtgaaaccctatgtctactaaaaatacaaaaaattagctgggtgtagtggcgggtgcctgtaatgccaactactggggaggctgaggcaggataatcgcttgaacccaggaggcggaggttgcagtgagctgagatcgtgccactgcactccagcctgggcgacagagcaagcctccatctaaaaaaaaaaaaaaaaaaaaaaaaaaaagagaagagaagtactgctcagagaaaagaaggaattaccagcaacaggctgggcccatgaaactctgagcgggtaagatagagggaaagtgagcatgctgggtcactctaggcattttcctctgactcatcaaacattcccaagtcacagggcagctggatgctggccttagctgggtacagggctctgactccacgatgtctcctttggggactcaggtgcctcctaagctccttctgccttcaagaggcaattcagggtcggcatagttcaacccagggctggctggtctgattttcaatacccaaggaacaaaaggagacagaggccatttaaggcttctcttggcagagactggaggagagacaggatgcaatgagcaaggggtggggaggatggagtggaaagaaccttgaattaggagagctctgccttccgaggtgacccaaaccaacaggcattcaagagagaggcaagggaatgactacggacccacacagtgccaggaactgttagacacctgacaaacgtcatctgtttaatttcacctctgggacctcagttttttaccgggaacctgaacagttctggaacatactggaagcctgtatgctggtggttaatcctattaactttggagtcaagactcctttcctggaattaccacctctgttacttacacagttgcgatctcgggcaagttacttaacctttctgccctccactttccctacctgtgaaatgtggacagtagtagattatactgcacagaatttattaaataaggtagaaaaggcgcagagcctgacacgtagtaacgttgtagacatccaataagtgacaattatttttgtttggggctcctcccagctactgaaatcacaagtctgggaaggggttcaagaatcacccctaggccccaccgggggccccataccaggtccccatgcagacgtcccacccccgcctcccagctgatcacaacctcccgggctctcccccacggcccacccaccttcctccaaccccgcccccagccgttccccaccaacctcactccatcagtgctccctcttcaggggcttattccccaccacccaccacccaccgcccacttcctcgacacccgaactttggtcctccaggatccttccgcagtgttttcacctctcggtgttattgacgatcactccgccgccctccgagtgattcttgttgagcgccatagtctctccaacaggggtcccgagactcaaaacgcaatgagcttgcgcccctcttcgccccgcccctagtggcgtcttcttattagagtcagccaatcaaagctcgagtgcggaggctggcccaaacacctgacccgaacgtcacgtggtaatagtttactccctccttccagttcctcctgcgcaacaaacaagatgaagactacaattcccagcaggcaacgcccccgcagcctcggcctgtccctatgctggaggaaggatgcattctggaacttgtagtctcctggatcataggcctgaattggttccacattttgcgtaaccaatcggcttgtgccatccccaccccgcctcttcagccggacggaaataaacagttccgctcctggcaggggcgcgatcttggggactccggcagcgcgttaagggaagtcctgctggtcgaatgcgacctggacatggcgtgggagcgccgagctgtccccttgtggatggggagctttcgttcactcagcagacgtttatggggcgcatgcgtgactctggggcgtttagctgagccggaggccccggctcttggggacgcggtgggctggcggcgtcggatcaccccgccatccatctcaccactcccagcgctgagcccggggggcggggagagtccctcatgggaaggggaggccgtgtgccccgcctggctcccaccacgttcgcaggccggccgggcgcccctcgcagccccctctccggcctcgcggtggcgccgctccccccttagcgcccagcggggtcccggccggaagactgaaggctgagtgggactgggcacggcgcgaaaccggcatcctgataactaggatttacagaataaggctgactcctgtcagctcgtgacccagccctgggcgtcctccacggggcagctgtcattccctaaccgccccccaccaaacccctgcacctccgagctgaatccgtgaggcggagagagggggctgcacttcccacgtggtagttccggtactcgttaatgttaaggaattagagtttgcttttcagtagacagctgctttcctgactgtggtggccaacctctagatccacctgcttgacttcgctttccagggaggtctcctatgtgaagaaacaaagctgcctcactagaaaagatcaggaaacagcagcgttctgtgaggtcctgtgcaataccaggttggaccttgcgggacaagtacagtgggttaaggatagtcataatgaaatctgccccaatggttagatgtattttggcgcctgcaatctctgcagtctttaaaaagaattaagtcagactatgtgctgatatgggaagatcatcaagggttattaagcacagaatgctgtatacatatagttgtatttgtataaaaaataggatctagatagaaaatttttgcaaagatccatcagaaaatgtctgtggcatttttgagacatgggtctaggaatttggggtggattggtgactcggtatgtcagtatgcattgtactctttggtactgtttaatttttttttcctatgtgcgtttaaaatataaatttaggccgg[138 bp omitted]gacgtg[132 bp omitted]tctcaaaataaaataaaataaaaataaataaataatatgtaaatttaaaaaagaaaagcaggccggggtttgtggctcacgccaaaggcgtgagccaaattccagcactttgggaggccaaggcaggtggatcacctgaggtcaggagttcaagaccagcctggccaacatggtgaaactccatctctactaaaaatacaaaaattagccgggcatggtggcgggcacctgtaatcccagctactcgggaggctgaggcaggagaatcgcttgaacctgggaggcagatgttacagtgagccaagatcatgccactgcattccagcctaggcgacagagcaagactccatctcagaaaaaagaaaaagaaaagcaaaatccaggcctggtgccgtgcctgtaatcccagcactttgggaggccaaggtgggtggatcacttgaggccaggagtttgagaccagcctggactacatggcaaaatcccatctctataaaaatacaaaaattaggccgggcgcggtggctcacacctgtaatcccagcactttgggaggccaaggtcggcggattacctgaggtcaggagttcaagaccagctggctaacatggagaaaccccgtttctactaaaaaataccaaaaactagccgggtgtggtgttgtgcgcctgtaagcgcctgtaatccgcgcgcctgtaatcccaactactcgggaggctgcggcaggagaatcccttgaacctgggaggtggaggttgcagtgagccgagatcacgccattgcactccagcttgggcaacaagagcaaaactccatcccaaaaaaaaaaaaaaaaacgcaaaaatacaaaaattagttgtgcatggtggcgtggttcctgtaatcccagctaatagggaggctgagacatgagaattgtttgaacctgagaggcgaaggtttcagtgagccaagatcgtcccagtgcactccagcctgggcaacaaaggaagattctgtctcaaagaaaagaaaaagaaaaaaaggaaaatccccccagcaaagagcaggcagcattggctgctctaaggaccataaatgggaagatggggacaacctgcccacccctctcccacccctttgccaaatacgttggagacaggagcaagttcaggttttgccaggccttgaagcttatacaattttggaggctgtcttggttgtttatgtttttgttttttgagacagggtctcattctgtcacccaggtgcgatcatagctcactgcttccttggaactcctggactcaagtgatctggaggctctttttaagaaataaaatacacaggccgggcgcagtggctcatgcctgtaatcccagcactttgggaggctgaggaaggtggatcacctgaggtcaggaatttgagaccagcctggccaacgtggtgaaaccccgtctttactaaaaatacaaaaaattagctgggtgtggtagcggtcacctgtaatcccagctactcgggaggctgaggcaggagaatcgcttgaaccctggagacggaggttgcagtgagctgagatcaagccactgcactccagcctgggcaacgagaggaaagctctaactcaaaaaaaaaaaacaaccccacaattattcattcacaatactgtggctacagtgaggcctcctgacaggaggggaaatgacaagaagaggaagttgcagtgcagagataacaagcttgaccagctccggctacaatgtccagaatttctaagttttacaaaaacatatgaccatgtgaacacacttcctgggcggctcccatgactttggggctggaacgtaccagaactcaaaactcaaaccgaagacttcaacaatggtttattgctgaaccaggtgagcagcaggaggctcccctgggcccaggtctcagtactcagacctctcctctggcctcatactcctgtctgcctgtctccagatctctttttcactgcagtatgatgctcatattctccacactggagcacatcttagcggtgcgctaaggaggagtgcaggttggcctcagataccagcaggcaaggtctggggcagctgagcccctgaactggtcacctgttttttctgtttataattttatttattatttatgtatttatttttgatacagggtcttgcccgtctcctggggtggagtgcattgacatgatctctgctcactgcagcctccgcctcccgggttcaagcaattctcatgcctcagcctccagagtagctgggactacagaatcgtgccaccacgcccagctaatctttgtatttttagtagagatggggtttcaccatgttggccaagctggtctcaaattcctgacctcaagtcatccgcccacctaacactcccgaaagtgttaggattacaggtatgagccaccgcccccgcctggtcgcctcttgactcccaataagatgaatctgtttgccccagtgagccaaataaataccattttcactgaacaaatcattttctgtgtgtgccatgacataaaagaggttggcaggcccgtagaggtggctcatgcctgtaatcccagcattttggaagactgaggcaggaggattgcttcagcccaggagtttaagaccatcctgggcaacatagtgagaccctccctctaaaaatttaaaaaaaaaaaaaaaaaaaaaggttggcagcatttaccaaacggtggctgtttttccttaccttgacccacagtaaaaatatatagggcttgagcccaggagtttgagaccagcctgggtgacagagcgagaccctgtcttacattgtcactcaggctggagtggtgcagtcatggcttactgcaccttcaacctcccgggctcaagcaatctttttacgtcagcctcctaagtagctgggactacaagtgcacatcaccatgcctggctagtttaaaaaatttttttggtagagatggggttccattatgttgcccaggatggtcttgaactcctggcatcaagcagtggtcctgcctcagcctcccaagtagctgagagtacaggccctgccaccaccacatgctgcttaatttgtattttgtagtgggatatattctgaaattttctgttttattttgtcatcttaaaaaattgctgcaagcagccgggcgcagttgctgacgcctgtaaatccagcactttgggaggccgaggcaggcagatcacgaggtcaggagatcaagaccatcctggctaacacggtgaaaccctgtctctactaaaaaaaaaaaatacaaaaaaattagccgggtgtggtggtgagcacctgtagtcccagctactcaggaggctgaggcaggagaatggcgtgaacccaggaggcggagcttgcagtgagcagagatcgagccactgcactccagtctcggcgacagagtgagactccgtctcaaaaaaaaaaaaaaaaattgctgaaagggccgggctcggtggctcgcacctctaatcccagcactttgggaagccgaggcgggcagatcacctgagtcaggagttcaagaccagcctggccaacatggtgaaaccccgtctctactaaaactacaaaattagccgggcatggtggcgcaagcctgtaatcccagctactcgggaggctgaggcaggagaatagctggaatctggaagacggaggttgcagtgagccgagatggcgccattgcactccagcctgggcaaaaagagtgaaactcaaaaaaaaaaaaagtgctgccggcgtggtggctcacggcggacacttgaggtcaggagtttgagaccagcctggccaacatggtgaagcccccatctctactaaaaatacaaaaagttagccgggggtggtggagcgcacctgtagtcccagctactcaggaggctgaggtgggaggattgcttcgctcaggaggcagaggctgcagtgagctgagttcgcaccattgcactccagcctgggtgacagagtgagacccccatctcaaaaaacaaaacaaaacaccaaaatcaacaataatacagaagcttgaaagaggagccccagggtactaaaacccagccctctgaagagcgggcctgggccggctggtgctggtgcccgtgcctctgaagggagctcagggtagctggttctgcaagggttggaaaaagtagaaactggattcagctgctgctaaagaactgcagctgccccaatgaagaagctttcctgggtacaatacaggcaaaaatagtgagcagatgggaggctggggccttctccagcccttcaggcctctctagcgccccctcttggcagagcctggcagggagcagcaggcaatggagaaacgtggctctgggtgcattggctcatgcctgtaatcatagcagtttgggaggcccaggcaggtggatcacctgagggcaggcgttcgaggccagcctgggcaacacggtgaaaccccatctctactaaaaatacgaaaattatctgggcgtggtggcgtgtgcctgtagtcccagctactcaggaggctgaggcaagaaaatctctggaatccaggaggcagagcttgcagtgagccaagatcgcaccactgcactccagcctgggcgacagggcaagacttcatctcaaaaagtagtaataaaaaataaaattaagaaaacaaagacatgtggctctgagtcccagccagaccatgaagctgagttgggtgggtgggtgttatgagttgagttcggtccccccgacttcaaattcacatgttgaagtcctgacctgcagtacctctgaaagtgaccttatttggaaatagggttgttgaagacatcattagttaagatgagatcattagggtgggccctaaatccagcgtgactggtgcccttgtaagaaggagaaacttggacacagacacacacgcagggagaaggcaggcggtgcaaagagggaggcagagagctaccaagattgctacacggattgctacatattgtcaacaaaccaccagaagcaaggagagcgtcaggggacagattcgctctcacagcctcagaaggagtcaaccctgcccgtaccttgattccagacttcggtctccagcactgagacaatacattttgattgtttttgtttgtttgtttgttttgagacggagtctcactctgtcgcccaggctggagtgcactggcgcgatctcagctcactgcaagctccgcctccgggattcacgccattctcctgcctcagcctcccgagtagctgggactacaggcgcccgccaccacgc[195 bp omitted]cagcgcattaatatagtgggtttggagctaagagtcaagagtttggcatcatccccaaaatgtgcttggcccagggcagtg[140 bp omitted]atctttactaaaaaatatacaattagccaggcatggtggcgcacgcctgtaatcacagctacttgggaggctgaggcgagagaactgcttgaaccctggaggcagaggttgcggtgagccgagatcatgccattgcactccagcctgggtgacagagtgagactctgtctcaaaaataaaaataaaaataaaaaatagaagcacttgggctcagacggtcggcatctgagcagcagcagacccagtggagaacagagtggaggctctcccatctgaggccccggtggggtggctcatgcctgtaattccagcacttgggaggccaaagtgggtggatcacttgaagcaaggagttcgagaccagcctggccaacatggtgaaaccctgtctctactaaaaatacaaaaattagccgggcgtggtagcgcacgcctgtaatcccagctacacaggaggctgaggcaggagaatcacttgaacccaggaggcagaggttgtagtgagctgagatggtgccactgcactccagcctgagcaacagagttggtgcagggaagaaagctctccc[131 bp omitted]ggtgaaaccctgtccctactaaaaatacaaaaattagccaggcatggtggtgggcgcctgtaatcccagctactcaggaggctgaggcaggagaatcacttgaacctgggaggcagaggttgcagtaagccaagattgtacgctccagcctggatgactccgtctcaataataataataataataataataataataataataataataatagtgattctactgagggggaagatgcccctccccatatgcctgaagttgaatttcttactttcttggcaaagggcagcttataatcacattttttttttttgagacggagtctcgctctatatggcccaggctggagtgcagtggcgccatctcgactcactgcaaactccgcctcccgggttcacgccattctcctgcctcagcctcccgagtagatgggactataggtgcccgccac[186 bp omitted]gacatttcttttacctgagtttgggggaacaaatttgtgcttgatacaccaagtctttttctttcagccagttgtcctctttctaatacgccagtgagaaaaataaaactcctggtaagtcattggtaactttctgccactcaccgttggttgctctgctgcggagtggcagatgccctgtgaggcgttggtgatgtttggtgacgtggaagtgggctattttggatgagtcctttttggccgtgggtatttcaagaacacaaattgcccgctccctcatcagaagcagggccagagcgtgtctggggctgtttctggttgctatagagatgggccccaccctgaagttcccgctgggacctcctggctctgtcaagttcagtttccccagacacagctgcaaggcctgttctgagcaattcctgctgttagagtgtttatacacacctcgagtgcatttccgcttctgagcctccaaaaccacagaaagccagaaaggggcggtgtgacctctgaagatgtccgcatcccagtactgaggagccttggctggagggacccccctctacaccagagagctggaggagaggagggaccaggggaggtgcttaagggcctggcccctccctgctattatatttctggtcccccttcccagagttagggggctcttctccacttccctggcaagatgcaaggtggcagttttagtcattttcatcctctttttcccctccttaagcttatctctcacctaaataatagaatgattttgaaacttcaaaccctttttttttttttgaaatgaggtctcactctgtcacccaggctggagtgcagtagtgtgatctcagctcaccgcaacctatgcctcctgggctcaagcaatcctcatacctcagccttcagagtagctgagatcccaggtgtgcgtcaccatgcctggctaattttttttttttttttgtatttttggtagagatggggtttcaccatgttgcccaggctggccctgaactcctgagctcgtgatcctcccgcctcagcctccctaagtgctaggattacaggcgtgagccatggcgcccagccgaaacttcaaatctgattgtactgtttccccatgtgagaccatgccctggcttcccattgttcctaggaaaagtccagaatccttaccaggctctgctctgcaggacctggcctgccacctcgggcctctcacccttctgccctgcactgctgtcccctgcagcgccctggctggtctcgagcccacacccatcctttctgtcttgttaactcctccttgtctttcaggcctcagcagtcctttcttcaaggaaatgagccctagaaatggccttctgccagccccattagggttccttcttatggccactgtccttttctttctttttttttttttttggcaggggaggggggacgcgtggtaaaatatacataacataaaattcaccattataacctttttttttttttttttttttttgagacggaatcttgctttgtcaccaggctggagtgcagtggcgcagtctcggctcactgcaagctccacctcccgggttcaagtgattctcctgcctcagccccctgagtagctgggactacaggtgcccgccaccacacccagctactttttgtattttagtagagacggggtttcaccatgttggccttgatctcctgaccccgtgatccacccacctcggcctcccagagtgctggatttacaggcgtgagccaccacgcccagccaattttaaccatttttaaatgtacacttcaggggctttaagtgaatacgttgttgtgcagccatcagcaccatccatctccagaactttatcatcattccacactgaaactgtccccattaaacaccaactccccattccctgttgcccagcccctggcaacctccatcgtattctagggacctcatatataaatggaatcataaagtatttgtctttttgtgattggcttattttacttggcataatgtcttcaaagtttatccaaagtgtagcatatgtcagaacttcttgattgtttagggatgaataacagtccactttgtgtgtgtatatacatttttttttttgcttatttattcatgtgtctatggacacttggattgtcccaggctggagtggaatggtgtgatcttggctcactgtagcctccacctcctgggttcaagggattctcctgcctcagcctccagagtagctgggattacaggctcctgccaccacacccggctaattttgtatttttagtagagatgggggtttcaccctgttggccaggctggtctcgaactcctggcctcaagtgatcaacctgcctcgacctcccaaagtgctgggattacaggtgtgagccactgcacacggcctgctttcagttattttggatacgtatccagaagtggggttgctgtgcttttctttgatagtacttagtacagtgacacctatcccacagccgtttgtgtggtgcctgtgaggacaggggcatctctgtgacgcccactgctgtatccct[138 bp omitted]caacatggagaaaccccatctctactaaaaatgcaaaaattagctcagtgtggtggtgcacacctgtaatcacaactactcgggaggttgaggtaggagaatcacttgaacccgggaggcagaggtggcagtgagctgagattgtgccactgcactccagcttgagagacagagtgagactccaactcaaatatatatatatattatatatataaaatacataatatatgataattgtatatgtataatataatatataatatatatttgagttggcgtctctgtatctacatagagagacactctacataatatatatattttttatatatatatacaatagttttgttttgttttagagacaaggactcactctgtcacccaggcgggagttcagtggtgcaatggtagctcactgtagtcttgaactcctgggctcaagtgatcctcccacctcagcctcctgaacagctgggcctgcaggcacgcaccaccaccccggctaatttgtttttatttttacagagacaaggtcttgctatgttgcccagggtagtcttgaactcctgagctcaagagtccccttgccttggcttctcaaggtgctaggattacaggtatgagccacctcacctagcctaattttttatttttattttaggcatggggtctcactgtgttgcccaggcaggtctggaacttctcacctcaagcgatcctcttgcctcagcctctcagatgttgggattacaggcataagccactgtgcccagccctgatacattattgttgaatgagtgagtgaaagtttcctatcaaaacgggtagaacaagatgtagtgtctggaaaacttaggtgtgggctaatcttagcccctgaaaaacagatgcttgggatcccccatggatctctgtcacccaggctgaagtgtggtagtgtgatcacagctcactgcaaccttgaactctggggctcaaacaaccagtactcccacctcaggcttctgagtgactgggactacaggctcacgccaccactcctggctagttttttatttgtttatttatttttttttggtagagacgggatcttgctatgttgcccaggctggtctccaactcctgggctcaagcgatcctcccacctcagcctcccaaagttttgggattataggtgtcagcccccaagcccagctgttttttatttattttattttatttcagtcggagtctccttcttataacccaggctggagtgcaatggtgccgtctcagctcactgcaacctccgcctcatggattcaagccatca[134 bp omitted]cggcctcccaaaatgctaggattacaggcatgagccaccatgcctggcctgttttttatattaaagcaatattgggctgggcttgtatattaaagcagcattgggctaaaaatacaaaaattagctgggcgtggtggtgcacgcctgtagtcccagctattgagtaaaattcaaagtttgaatgtcatttaaagataaagtacaggccgggggtgggcattgtggctcatgcctataatcccagcactttgggaagatgaagtgggaagattgcttgggcccggaagttggagaccagccgggtcaacatagcaagaccccatctctatttggttccatatacccctgagggtgtcaggagcacgtggggagaacacggaggctctccatcccaagtgaggcccacaaggaccaccaggggcttccttcatttcttatgcatctcccagatctgactgtgtggacggggaatgatctcgccttctagattttgtttgtttgagatggagtcttgctctgttgcccaggctggagtacagtggtgcgatctcagctcactgcaacctccgcctcccgggttcaggagattctcctgcctcagccttctgagtagctgggattacaggtgtgcaccaccatgcccagctaatttttgtattttagtagagacggggtttcactatgttggtaaggctggtcttgaactcctgacctcgtgatctgccctcctcggcctcccaaagtgctggcattacaggcatgagccagcacacctggccaccttccagattttgaatgtcggcatcaaatgtgtgtggggtgtttggggttgaacgggacacagaccctgctcagtgctccagtagtcccctgttatccatggttttgcttacccacagtctactgcagtccaaaaatgttaaatggaagattccagaagtaaacaactcataagttttagatcgcatgccgttctgagtagcatgatgaaatctcacaccatcccacttcatctagcctgcctgggacaagaatcatccctttgttcggggaatccacactgtagggactgcccgcccattgtttacttttagccatcttggttacttaccagatagaaaaaaccatagtgcatataggattctgtaccattgcagcatcaggcacccacgggggttctgggaactcatcccccgcgataaagaagtactagagtactttcctcctgggagagatgcagtagctgccagcctcagccacacccagttcggccccatcctcctggccaggcctcggggagtcacagtccagccgcacccgctgtgcctgggaggagagggggtgaagggaggcacttctgtgagtgttcctcgggccttgggaaggggaggacaaggatgaggagaagggaggaaagaagtctgggggtctgtttcctcctggggtgtggggaggccatgggagcagtccaagctcttcctcaggctgttggttggaaccccagctcattttcccacagaaacaaagcgggagtggaggttggcgccctgcctggcccagagcagccaggcccagcaaccagcgccaaagcctcggaaacccctcaccctgcaccattgtctgggcctggcgggggctctggcgggagcttctgaggccacagaccctcgggcagccttgccaaggctccggtgaccatgggaactgggacccagccgagggcagcatatacacaggcggcagcgctgggaagcagggctctgtgtgtgtgagtgtgaggtgtgtgtatgtgtgcgtgtgtgtttagacatttcttgttttttggagacagagtcttgctctgttacccaggctggagtgcaggggtgtgatctcggctcactgcaacctccgccccccagattcaagtgattcttttgcctcaccctcccgagtagctgggactacaggcacgtgccaccactcccggctaatttttgtattttttagtagagacggggctggtctcgaactcctgatctcaagtgatccacccacctcagcctcccaaagtgctgggattacaggcatgagctaccacgcctggcttgtttaggcatttctaagcacaagacacacctaggctgggcggtatggaaagagtgttctggactgggtaacagtgggcagcccccccagtacccctgtgcctcagtttcttcctctgtaaatggtagtgggaggggaacgttgagactagatcggtggttttctcatttttttctttttcacagtttctttttttaaaggagccttgaatcaaataggcaaatgcttctctgattaaggtgttggcaggggtgctgagggacctcccccagcctttccccagcccaccccgctcagtgcacctcctcctaggtcttctcagagcattgttggaaaagtcactgggctggagcaacatgcattcacacacaggcgttcacccaggcagacactcacacacagcacacagacacacacgaagacatacacacatgtatacagatatacgcacatatacgcatacacacaaaacacataggcatgcagaccacacacacacactcacacacacactctcacactccagggtgacaaaggaaatgcgagattgtagctaacactccaggcttcggagtctgaaacttgggatctgaagagccagccccttgctagctgtgcacccaggggccagccaatccctggctctgagctgcaaagctgcaatacagggatatgggattaaaatgcttgttgcaggcagggtacagaaccccgtctctacattttaaaatgtattttatttatttatttatattttttatttatttatttatttattttttgagacagagtctcgctgttttgcccaggccggactgcagtggcgctatctcggctcactgcaagctccgcctcccaggttcatgccattctcctgcctcagcctcccgagtagctgggactacaggcgcccaccaccgtgcccggctaattttttgtattttcagtagagacagggtttcaccgtgttagccaaggtggtctcgatctcctgacctcgtgatccgcccgcctcggcctcccaaggtgctgggattacaggcgtgagccaccgcgcccagccaatgtattttattttatgtatttatttttgagacagggtctcgccctgtcacccaggctggagtatagtggcatgaacatggctcactgcagccccaacctcctgggctcaagggaccctcccatctcagcctcccaagtagctgagaccacaggcgtgcaccaccatgctggctttttgtttttgtttgttttttgagacggagtctcactctgtctcccaggctggagtgcagtggcacgatctcgactcactgcaacctctgcctgctgggttcaagtgattctctgcctcagcctcgcaagtagctgggattacaggcgcctgccaccacgcccagctaattttttttgtatttttagtagagacacggtttcaccatgttggccacgctggtcttgaactcctgacctcgtgatccacccgtcttggcctcccaaagtgctgagattacagacatgagctatcacgcctggccaattttttttttttttgagacggagtttcactctatcgcccaggctggagtgcagtggcgctatctcagctcactgcaagctccgcctcccgggttcacgccattctcctgcctcagcctcccgagtagctgggactacaggcgccccccac[177 bp omitted]gatgaggtctcaccatgttggccatactgatctcaaactcctgggcttgagtgatcctcccacctcagcctcccaaagtgctgggattacaggtgtgagccatcatgcccagcctcaatatttttttaaagagatgtttgtttcccaaacttccacgcaagactctggagctacaggccactctgcagatggcatgcttgctgagtggctgtgtctgtggccacaggtgtgactagtcatgcctgaattccaccaagaaagcaccaggcctgtctagctcacattccaggacatgccaacacttcctgcagggtcagagaccagaaggttccctggcgaggggcgcctgtggggtagggagtgccaagttgggggacaagatgagacagcaggtggcctgaggggtgggagcggtcctctgcaaggtaggaggcttgtagtaggtggtccaaggagcatccaaggggacagcggggcagccttctccaccagccccttcactgccgggtgagctggggacccatggctgccaagggaacgatgttgaaaacacaaagcaccaggggcaaggaggccccgcccggaaaaacaacatcctggctgctagagcccaggcaggctctatgggaggggctatttttagctgctgaggctgctggggctggacttgtatggccttgctgtctggctgcataactcacccattatcccgcctgaccttgagctgggcgtctgtctgagaggcctctctgtctgcccttgccctcggccacagcccctctctggggtgcacctgggccacacagaacccaggcaggagtgagctggcctgggcctggaaacacactggactgtagcctcagggcgccccaggcctggctcaggttctagggcagcagagggcactgggccctcccagaagagaggcagaggctctcctggggcacaggtcacaggtgtccccagcatggagggcaagaagattccagagggggacataagtccttttattttttgagatggagtcttgctctgtcgcccaggctggagtgcagtggtataattgatctcggctcactgcaacctctgccttccgggttcaagtgattctcctgcctcaggcccctgagtagctgggagtacaggcacccacaaccatgcccggctaatttttgtatttttagtagagacgagggtttcaccatgttgcctaggctggtctcgaactcctgacctcaagtgatctgcctgccttggcctcccaaagtgctgggataacaggcatgagccaccgcgcccggccaggacataagttctcttattgtagatgttctgggctccagccacaccctgggccggctctgtgggctgagggctatgtgtgaaggaagctccaggtctcaaaactctcttgcccacgcccaggggtcctgccctgttcctggaggggtgatgcctgcatttaatgctgggcacaaacagtacaaacagcaaaggcaggtccagaactaggctgcggcatgaaagataaaaatagctggtgggagtcaggccatcccaagtaaacactcaagcagccaggacggcagtggggctggagaagccacctctggctgcccgtgctgggaaaaagggagtgggggtgccccaaagggcaggtaccctgttccagcccccttctcccaggccagggctccctctcaacaggaatcctgggacgaggggctccggcccctctcctgcctgcccactcagccagcttacaaatgagagcggttctgggaatccttgggtagagaggatggaaaaggagtcattcattcaacaagtgtttattgagcatctactacatgccagacactattctagaaacctgggaaaggaggggttagggtagcttggagctgtcccagctgtagctctgtctcccagaagtgaggtctgcaggggaacagggtctgggggtcctcctgcctgggagagggaaggctgagtgtataaaaaggtggaagcctctagaaatgagaaggctgggtgtgtgggactcatgctggtgccttcccagacgaaggagagggcccagaggaggcagcttcctggagcagagacggcagcaggagcgcccgtgcccggcatcacctcctcttcagcacggatatgcaggacttcttgaggggcccgatctgcaagtgggcgtccacactctccaggaagaaggcaggcttgagtctgtgggtgaagagccccgcaaagtgactgtccaggcggctctggaaggggtcaatgggggaggccgggatgccaccccggcggggccgggaggccttcagcctccgcaggaggctcatcttgccgtcccgtacagcatagaaggccaaggcacggtcagcgtattccaggcagaccccaaccgtgggcgagaaggggtggggcaggggagcctccagcccatgaaaccagacggagaagctgcgtccattccactgcaggcagcaggagtgggcgttgcggcccagccggccgcggtcgtagggctcttgtggggagaagtcttcggccatgacccccatgctgacccagccctcgataatctccacctcccagtagtaggtgcctcggtccagggcaccctcgcccagcacctgctcacaatgggtgaagcgggtgggcgacaaggggtagttgataggacacagcaccctcttgacacctttggttccaaacagctgcaggaacttgtctgctgtgtcgctgtccaaatccacaatataggcaactgatcccgtggacagaagagagaggcagggctcagggccaggctcagagggcacggcccctccccaagtacccacccccccaaaacacagcctctcccctgctttccaaccggcacaacccagccccgccggggaccaccccaggagctgccctagctctccccacaaactggggagaggaatcctaacccttgtgtgccagggccctgctgggaccagcccagcagccctgggagggcccagtgtgagtggagggggcacgggcgtccacttacacttgaggaaatagtccctgggagcttcactctccaagaggttcgtactctcgaggtcttggggctcagcatcagctgtagaagaggagacagtggtgagaacgcccccagactgcccccctctgaacctgtgactacaatccctacccccttcacttcctcccagagtccagagccaccagggagcaagcaccacccagatgtggcacgctgtgctcacacacatgcccgttgcctgtgttctgcctcttgccccatgtgcttcccgggccacagccctctggagctagagggtgggctaggagaagccccctctaccccaggtccaaggggctgattgatccccacagggtggcagctctagtcactggcaggatttgggctcctccctgtgccaggcacaattttcctcctccacttctggatgggcgccaggcctgggggcctgtgcgagaggctggcagagggtgagtcatcgggggggcgtggggcggtgcccaccttccgagtccagcttctgtggcccatcctcgttgccacccggccccctcagctgctcccactggttgacgcaggccacggccagcatgtctctcactgcacggacagcttgggatgatttggtgaagctgagctccctcgggggtccaggcccagggccacacccatcctccagggccagccttagtgccagcagctcctgtgccagacaaatgcccattaaagtgctgctggccatggctcctccttgctgggggtggaggcagctctgccaggaagtcatgcacccactgcctcctcctccctccaccccacctgtcccagcttctgttccttccgtggcccccagagcggccttcacctgcaggaagctgactgagtcagcttcagggacctggctgagattctggcgggctcggctcaggcggctgcgctgttcctcctgtcgccgcaggtcaccctgggagcggcctagcatggcagcttccccctcctcgatgaagcccagcacctgggtctggaagccctgcagggcggccgcagcatctgcaaacagccggctcaccctctcccgctctgctacggctgcactctgcacaggacgacagtagagggggcaatgagggcaaagaaccgtcccggactgtacccccctccttccctgaccccggcttcccaccggccctcttgaggggacagaggggccagactgagcctgtcctggatctgggccaggtcaggggacacttgtgctcagtaggtatgggcatggtttgtttggagtggattgttccatgctgagggaggggtgtttgaccttgatgagggccactgtgcgcctggactgtgcaatgccagcacccagctcgtccatgcggtcctccacggcgctcaggactttggactgctcagcctgtggacaacaccctccatgagtgtgaggtctggcagaggccacagccctacactcgggtcccaggccttgccaggggagagaagggggtgactggggagtggtatctgtgcatcaggtgggactggagtggccacgatgtcccataatatgccagaggtgcctgcagcccaggctggtgcctttcctgaacgcctggggggcgtgcaggctgactgggtgtctgcctcgggtctctgacaggaggcctagtacagggccgtccgctggtctcagtgttgctcagatgaatttgagaacttcctccggcggggaagaggcagagagtaagccagttaggttgggaggtgggcggcggaggggtgactgcacaaggaggcattaagctgtcctgaggatcactgttcccaaagagcctgcatccacagtccaggcctggaaaaaaggggattccgggcaaatcccctaggtcttatgagtcactgctccaggcaggagaaacggaaaatcccttggccagaggcgccaagaccgggctggaggccaaaggaaactgggggcgggaggtagaggccgcggctcacatgctcccaccactggcccccggaacagctggacagagaatctgtgtgcccggtcgccctctgccgccctcctgccgcctgccacacccatcgaaagctgctgcctcagcccagggcaaatctgagctgagaccggcgtgaccctccgggcgggagcagcagccacgctaccggaaccccgcgggcctaacccggctccctcccgcctacacccccatagaccccggcccggcttcaggtcccctgcccgctcttcgcgtccttgtcctgttctcacgtccctccttcctcccttcccatctccatcaccgccagcagatgaccttgtcaaggctggaagggaccgcaaagatcctcaggttagaggaggagattaagacccaacccgggaagactggggggtccaaggtcctcggcccgctcgcgcgcggtcggtcaccagccccggctcacccgagtgtgcccccggagcccacctcctgaagcgcgcgctcctgctccagcggcaccagctcgtggccgcggtgctcctgtgcggcgcaggcctcgcacagacacacgcgctccgcgcggcagtagcgctcgagcggccgtaggtggcgcgggcacaggctctcctctagccggcgcagcggcggcaccaggcggtgtccgcggagggcggggctgcgctcgtgcgggcccaggtgcgcggggcaaaaggaggcgaggcaggagaggcaggacagcgcggcgggcagggccgcgccctcggggcacgcgtcgcagcgcactggctcttcgcccgcgggccacggctcgggagcgcagggggccgacggctccgggacactgggcagcgcgctgggtgccgagggctccggggccagggcaggggccgggccggggccggacccggggcccgagccctggcggagctgcagcagctcggacagcgtgtggttcttgcggagctgaaggccgtcggggaagggctcctggcacagcgggcagcgggccgcgcctccgggtccgccggctccactcgcgccacgatgcggccagagcgcgcccaggcaggcgagacagaagttgtggccgcagggcagcgtcaccggctcccggagtggctctaggcagatggggcagctgaagggtccactgccgtccatgactccgcggccgcccagggcgccgccgattgtgctccggcctgggagggacccgggccgttcgcgccgcggcacctccccctgggacctaggccagggctccggcccccgcccgcccccagctcggcccgccccgcagcaccgcccgcctgcgggcccgcggactcccagtccccgcccagacaacgcagggaggcctccgagcccgcgcgacccccaggggagtccgcgtggtcctaaggaagggcgctgctgaaagggtgtgaaactgagtgagcgcgggcggagaacgcgagaggtacagtggaaggaatgggaaggactcagcctccatccctctggtccttctgggccaggccagcgctccgcaggggctgggcgcgtctagctgtgtcatgcctgcacctttgcgctcgacccctccctggcacccttagcaaagttcctgagctgctgactgcagagaaaaataactgctgatgtacatatgtttttgccccttagcgactctttttttttttttttttgagacagagttcctctcttgtcgcccaggctggagtgcaggggcgctatctcggctcactgcaacctccgcctcccggattcaagtgattctcctgccttagcctcccaagtagctggaattataggcgcttgccaccacaccaggcaaatttttgtatttttttgtagagacggagt[142 bp omitted]tttctagacctgaaatgggaagttgacgtcattccctaagtcccttgtctgaggaatgtagttctggcccctggacactggggacacctgtggtggggttgggggttccccaactggaagtatttaaagctcatctaattatgcacttaaagtggtgcgttttattgtatgagttatatctcaataatgttaagttaaaacactacaccagaatgacaacaaaataagtaaagtagcactgattataacccaaagtgtaaaataaacatctatgagtccatgccgatataaataaataataaattaacaagctggggagaacagacatatttcgcattgaaaattccaaataatgtttttttatttttatttttttagatggagtttcgctcttgtcgcccaggctggagtgcagtggcgcaatctcagctcactgcaacctctgtctcctgggttcaagcgattctccctcctc[211 bp omitted]tcacaggtaactgctcataccactctggtgtattctctccatttggaatagaaagaaatgctgtgtttcagtaaggtgctgcagcgtggcttccttctgcaggatctgagggagactctgtcctgggcgtctgtcccagcttctggtactggctggcaattcttggcgttccttggcttgtagctgtaagatgcgctctaatatcagtctctgttgtcatttgccttttctctgtgtctgtgttcaaatgtcctttttttttttttttttagggagtcttgctctgttgcccactcaaactgctgggctcgagtaatctgcctgcctcagcctcccaaagtgctaggattacaggcgtgagccactgtgcccggtgcccatttcctcttatcaggacaccagttgttggattagggcacgctctactccagtatgccctcatcttaactcagtcacatctgaaaatactctatttccaaataaggtcacagccacaggtcctgggggttaggatccgaatacgtctttttcagggaacaggattcaacctataacagtgcataagtaaggaaatgttggagagaggcccaggcccaaatgtgctagaggtcatgcatgtcccccggtgttcctggccctctctgtgttccaggaccctggcccttccctaaacctcagcacacactgctgcttgtcccacacccaaacccttgtccacctctcccaccgggtctgcattcctgcctctgtttccccagctctctaggcttggggggtgggaaaataccctcaggtcccctgagaccagactagaaatgttcagaaggcacttcatgagttcagagctaaagaggagaaaacacaagcaaaagagcacaaatgtgccgggtgtggtggctcacgcctggaatcccaggactttgggaggctgaggcgggcggatcacttgaggtcacgagttccagaccagcctggttaacatggcgaaaccccatctctactaaaaatacaaaaaaattagccgggcgtggtggtgcacacacttgtattcccagctactcgggagtctgaggcaggagaatcgcttgaaccaaggaggcagaggttgtgccactgtactctccagcctcggtgacacagcgagactccatctcaaaaaaaaaaaaaaaaaaaaaagaaaagaaaagaagaaagaaagaaggagggacccagcctcttggggagggagctggctctccaggcactcaggaacccctgtcttagtgtgtctgggctgctatcccagaacaccagagactgggtggcttatacacaacagacactcctcacagttctggaggctggaagtctgcgatcacggtgacagcacagtcagggttccagtgagagctgcttcctgggttgtagatggctgccttcccactgtgtcctcacatggccaagagacagccagagagcctttggggccccttggacaagggcactcatgccatgaatgaggctccgcccacctgaagaccccacctcctaggaccatcaccttaggggtcaggatctcaacacatcaattctgagggtacacacacattcagactgttgcaactccaagtgccaaaagagcggtgcaatctgctcctgggggctccatgggaaaggctggggaactgtggaagtggcatttgagctgggctttcacagactgccaggactcaggcgggcagagactggggtgggaaaagaccttccgggcagagggagtagcagagggagccggcctgggtgtgtctgatttggcaggagggtgggtaatgagttccatacattggtttccaccaagagcactagagcacttgatcaggactatcacttgtttgccaagccccaggagcggttgggaggcccaggcatcagtgccaccctgctccgtggctttggtgcccaggctgcctgggtttggtgaggccacaaacctgcctggttctggaaggagggggtgcctttccggttgggtcccagccaaccctctgctccccacccacagcctgctgtcctccctgcttgaaaagatctgctccccaggaggaaagcacagagatgcggtttgtcagtgtggtggcatcttgctacttcttttctttttttttcaaatggagtctcgctctgtcgcccaggctggagttcagtggcgcaatctcatctcactgcaacctccaccttctgggttcaagcgattctcctgcttcagcctccccagtagctgggattacaggcatgcatcaccacgctcggctaaattttgtattttttagtggcgatggggtttc[131 bp omitted]cagagttttgaagttgtttgcctagtgtattagttcacttcaaaatgaattgtctaagagtcaagggcaagggtaactggcaccatgtgagctcagcatgttcacacctgccctcattctgtctgtccaaggaccctatcctaaaggatggcaactggaattccgataggtaccatgtcttgccagaggtcacataacttgtcctgcagaggaagcagaatttaagctcaagaggttgcagcttgaataattataaatctcacatatgactgtctggctgtagtagtagtgcttgagaaaaaaaggaaaaaaatcaaacaaaaacaagtggctgggtgtggtggttcacgcctataatcctgggactttgggagccaaggcacgaggacttgagctcaggagtttgagaccagcctgggcaacacattaagaccctgtctctggaaaaaaaaaaaacaaaaacaaaaagcaatccggtgatgacagtaattgaaaagctatttctagcttttcttctgtctctgaaaattattgaaaggggatccaaacaccatgtccctaacagcacttccttttctttatgcttttttttttttttttagacagagtctcactctttcccccagctggagtgcagtggcttactctcggctcactgcaactgccgcctcctgggttcaagccatcctcgtgcctcagcctccagagcagctgggactataggcgtgcactaccacgaccagctaatttttgtatttttagtagagagggggcttcaccatgttgaccaggctggtcttgaactcctgaccacaggtgagccacccactctggcctcccaaattgctgggactacaggcaagagccacggtgcctagccttctttatgcttttgatgtacttttttgttttattttgttttttggttaaaaagcttttttgtttttctgtttgtttcattgtct[139 bp omitted]cctcagcctcccgagtagctgggactacaggtgcctgccaccacgcctggctaattttttgtatttttagtg[156 bp omitted]gaatatatttatattatttaaaaagtaaacaggccaggtgcggtggctcatctgtgacgaggagtttgagaccagcctggccaacatggcaaatccctctgtctactaaaaatacaaaaattagccaggcatggtagtgcatgcctgtagtcccagctactcaggaggctgaggcaggagaattgcttgaacccaggagggagaggttgcaatgagccgagattgggccactgcactccagcctgagtgacagtgagactccatctcaaaaaataa[137 bp omitted]accccatctgtactaaaaatacaaaaaattagccgggcgtggtggcacatgcctgtaatcccagctactccggaggctgaagcaggagaatcgcttgaacccaggaggcagaagttgcagtgagccgagatcatgccattgcactccagcctgggcaacaagagcgaaactccgtctcaaaaaaaaaagtaaacaatttaacaaggcttataacaaaaactagtaatgttgtgtcccactgactccccatggacaaccaatctcaagtcttgtaatgatttcttttagcgtctgcctccacatctctaagccgtttaaggttccttcttgctctccttttttgtttttcttttttgagacagggtctcactctgttgcccaggctggagttcagtggcacaatcacagcttactgcagcctcaacatcccgggctcaggtgatcctcctgccttagcctcccaggaagctgggaccacaggcgcacgccaccatgccaggctaatttttgtattttttgtagatatgggttttcaccatatacgtggttttcaggaccacgctggtcctgaactcctgggctcatgtaatccgcccatcacagcctcccaaagtgttgggattacaggtgtgagccacctcgccccacttgagttccttttttttttttttttgagacagagtcttgctctgtgacccaggcgggagtgcagtggtgcaatcttggctcactgcaacctctgcctcccgggttaaagcgattc[220 bp omitted]gtgtaactttttaatttttaaatatttatttatttagttaaagaaagggtcttgttctgtcacccaggctggtgagatcacagctcactacagccttaacatcctgggctccagcaatcctcccagttcagcctcccaagtagctgggaccacaggtgtgcaccaccatggccaactaatttttgtatttttggtagagaggtgtgttaccacatttcctagggaggtttgcagcctcccgaagtgctgcgattgcaggcgggagccaccgcgcccagccagcttgtttgtgctcatgtttctggagactgcagatgcttgattacttctcctttgtgttgaattccccgtttcctggatcccagacctcccttttcccttcactgatttacttcttcatttttgaaaagtctgccctctgggtgcttcctgaggatggaggctgacgtgtctgcaagtgtctctgttcgggcttcatccctgactgacagtttggctgggcatggaatcctaggatggaaatccagtcccccaggatctcaagggctggctccattgtcttctaccttccagcttgatgctactcaaagcctcagttccaggcagcgtcctgctcctatcctgcctggaaaggcacatccccttgttctctttacccttcacctctgatatggtttggctgtgtccccacccaaatcttatcttgaatcccagctcccatgatccccacgtgtcgtgggagggacttggtgggaggtaattgaatcatgggggctggtttttcccatgctgttctcatggtaatgaataagtctcacgagatctgatggtttcataaagggcagttcgcctgcacacgctttccttgcctgcctgccaccatatgagacatgcctttgctcctccttcgctttctaccatgattgtgaggcctccccaggcatgtg[211 bp omitted]gaggcaggagaatggcgtgaacccaggaggtggagcttgcagtgagccgagattgtgccactgaactctagcctgggtgacagagcgagactccgtttcaaaaaaaaaaaaaaaaaaaaaccaaaaacgtctttcctttataaattgcccagtctcaggtatgtctttattagcgcacaaaaacagactaatacacctctctggcctccaatccaactccctccaatccagctggcctgtgaggtccctgtctttcacaacctctcctgcccttgttctgtctctgggtgaccatccacctgattgtgcacaactgaagcccagaatctgtaagggggtctggtgggtaggccagacatgctggaaacacccacaagctaatcaaacacgtcccctttccaaatgtcacatcccaactctgtgctgccttttccctcgataccagcgtgcgttttcctggagagacggtggagagttctatcagaatcagttcggctggctgggcatggatcacttgaagctaggagttcaggaccagcctgggcaacacagtgagaaccccattcttgacaagaaatttaaaaattagctgggcgaggtggtatgcgactgtagttccagctactcaggaggctgaggcaggaggaggaaggatcacttgagcccgggaggcagaggttgcatcctgcccttgcactccagccagggtgacagagtgaggccccatctcttaaaaaaaaaaaaaaaaaaaagaagagaaaaagcaaaaagaaaaaaaaagcaatggctcacacctgcaatcccaggtgtggatccctttgggaggctgaggcaggcagatgacatgggtcaggagtttgagaccagcctggccaaactggtgaaaccatgactctactaaaaatacaaaaattagctgggtgtggtggtgggcgcctataatccaagctactcgggaggctgaggcaggagaatcacttgaatgtggaaggcaggggttgcactgagctgagattgctccactgcactccagcctgggcaacagagtgcaaccctgtctcaaaaacaaaacaaattagctgggcatggtggcgggtgcctgtagtcctagctactctgggggctgagacaggagaatggcatgaacccaggaggcagaggttgcagtgagccaagactgtaccaccgcactctagcctgggtgacagagtgagactccgtctcaaaaaaaaaaaaaaaaaagaaaaaaagataaagggtgggagtctctgagcctatgttg[260 bp omitted]ctaacacggtgaaaccctgtctctactaaaaaatacaaaaagttagctgggcgtggtggcaggtgcctgtagtcccagctacttgggaggctgaggcaggagaatggtgtgaacccaggaggcagagcttgcagtgagccgagattgagccactgcactccagcctgggcaacagagtgagactctgtctcaaaaaatatataaataaataaataaataaataaataaataaataaatattagtcgggtgtggtggtgtgcgcttataatcccagctactcgggaggctgaggcaggaagatcgcttgaacccgggaggcggagcttgcagtgagctgagatcacgctattgtactccagcctgggcgacagagcaagactctgtctcaaaaaaaaaaaagaaagaaagaaaaaggggttattattaataatatagaacacgctcgcagaatatagaaagaaccaccacccaataggaagatgaatttcacataataaatgaccccaaacacctcccacctcagaagcagaaaggggccaactcttcctctctctgcccctttcagagcgcggctcagcccgttgggtgcttctgctgcagccttggattaggagggactatgaggtggggacagcaatgacagccatctggccaggccaatacatcctgcctggctgggctttcagctcccaccattgcccctagctggtcagcaaggtcctgcccgcctcctggctgtggggctgcacatgtcagattcccttcccatgtctggggagctcccacctgaggatcttgctggaaagtccttgcctgggctgtgccaatccaaggccctgccctgctcttgaacaaacagccacaggctaggagcagggccacaagatggaggctgcaatgacggcagtgatcggggtggggtcgtcgtgggaggttttttttttttacaaatataaaaacattatatatattgggggtatgtatattacacgtattatccttttaaaaagttttattgtgaaatatttatccatgagtacat[138 bp omitted]cctgggttcaagcgattcttctgcctcagcctccccagtagctgggattacaggcgcacaccaccatgcccggctaatttttgtatttttagtagagacggggttttgccttgttggccaggctggtctcgaactcctgaccttgtgatccgcctgcctcggcctcccaaagtgctgggattacaagcgtgagccactgcgcctggccaaaagcagacacccttggaaccacctcccagaacaagaagtggaacatttcaagtaaaaaaaattacacctgccctatgacccagcaaccccacttccggaaatacaagcaaaatcatgcccaggggtcttcgtggcagcttgctctgcaatggcaaacaccacaccaaaccaggaggagctagcctgtgccgacacctgcacacacggctgccccaaagtcccacacccaggggtgggatgctggagatgaaggtcctgccagtgtcacgtgctgcttagtgacagggttgaggggccttagtcggcttgactcaaggtggcctcactgtggccttttgtataaaaaaatcttcaagtgctcattgttccctgagtgactcacttgaggtaacagcctacatacatgaccataaatgtggccaaacatcccactcagaaatattcatcataagccaggcgtggtggcatacacctgtaatcccagctactcaggaggctgaggtaggagaatcccatgagcccatgaccgcacccctgcacaccagcctgggtgacagatggagatcctgtctcaaaaaaaacacatcaatgtttgtatagctaaaaagaaagaaatttaaatgtccaataatggataaataaacttgatagtcattagaatgactacagcaatcagtgaaaattttcaatcatgtgaaaaatgcttatgttaagtcaggaaacttcagaaaacactgtaatctgagctactctggaggctgaggtgggaggatcctttgagctcaggagctcgaggctgcagtgagccatgattgtgccactgtactccagcctgagtgacagagcaagaccatctcctaaaaacacaaaaatgtttaaatgcagaaaacaaaattgtttgtagaatacaattataaggatgcacaaaataaaaagactacaagacaggacggacgtctctccaaatgttacaaaaaattaaagagagctgcaggcggggaggagggaggaatctgtctccccctgggactactctggctcaccgcccctccctgactgctcctttggcccttatcatctccagaggcaagttcaggtagatctgaattttgtcacacacgctgtcctgtaagcccagaagtcccctgggcactgctctcgcctcccaggcccagacagtacctagaactgggttctctctggggcaagggcatcccatttatccccctcctagactgtgtccccttcaaaaaggctgcaacagtgaactctgcgtttatgctcacctcccccaacctcccatctctttctgagttaacagagaggccaacagctggtcctccagtccccaagctgaagctgggcagctcttgggcacataggcatggtggcagctatgccagggctccatcccatgccttcttcagctgagcacctcttcctggggccccagagggaacacagcccctggctgatggcacagggtcagggtcctaccctcgaggagccagaagacgggggtgaggggctggttgaagagggcatggaaggtgtacaggggctgggtctggggctccaggctgtagaaggtgaggcagcctgaggccaggtccaaatccatgcccaggagccgccctgacacccctgggaggcgctgggcttccccgttgtgccaggcctggaggctgtcctcctggacgcagagcccccaggagcagggtccccggccaatgttgtctgtgtggggccccagcctgcaccgtggcagttgcgggtaggagacgcccagtgtcaccgagtggtctgacgcgcgcacctcccagtagtggtgcccggcctggaagctctgggcacattgcacctgccagagctcaaagctgccgggcccgcctgggccccgggactgacgacagtgcttcacctgctggtcctggcgcgacagatagaagtgacggttggcgctgactggatcaaaggtcagattgcgataatctgttggggaaaggaggacagcagtgggctgggggaagacagcacaaccagatctccatttatccgctgctaaacctccgccaggcacgctgagcaccggccgtcaccatagcacttaatcctcgccacgacctcgcaggcggaatcctctatcagccccgttcacagctgagaaaactggggctctgagagccattaactcagtgttaagtggaagaattacgggtctgtgccccagactctgtccttcaacgcacactggctgcgtctgcttcagggtggatgtgcacgaggtgtgcagcgggtgggaccaggctcagatgtcccggcaggacagtcaaaacaagtgcccccctcactcacacgtgcatacgaacatgcacacacacacgtgctcacagcacacacaggcacttccttgcacacgcacacacaggggcacacatacacgaacggcctccttactctgccagagtttcctcctcagtggacaaactgtgcttgggaccggtgccaggggacctggggcctctagggggcaaagcagtgttaagggaatggttggagaggtcacgatgtgtgggccctgacccgcctccacccccccagcgggaggggcagctggacccaggacagcagggggaggcctggggtcagtcttacccacgggggctaagtccacaggcttggctggtgccccagggtggctcccctcttccaagaggaggccacacagccggcttagcaactgcttcaggtcacccagctgttggtcttcatcccactgcagaggggtcagtggcccaagaggccctgggggctggaggagctgcgattcctgagccccagggagaacaagtaagcctgggcctgaggggcagggaagcaagtccgccacctatgccctgagccctcgcacctgcaggaaggtctgctcatccacctgctccaggagctcccggatcctgcagccatggcgagccacagcctccaaatggacccgcagccgctgctcctcgtctcgagcctgtgccagcgcctgcgtcttggccacctcgatgctcctcagtgctgtcgtgtgctgtatttccagggcctgtagcaggctgctgaacttgccggagacccaggaggccaagatgcaggccgagttctgggcgggaacaggaggggcttcagggtggccagggccctgtgccataccaagggaggctagggccagggctgcctgctgggctgagggtcagggatgtggggaggcagggtcccgggaacctccccaggacccctgtgcccagctccctgctcagccccgctccctgctgcctggtgttccagggaccagctggtggccgccccaggatgcagtgtgaggccatggtgggcgggcaggcacaggcctcgtacctggatctggctgctttgcttgcgcagctctagtagctggccttcggcctgggtggcctgctgctgggtaacctccaggctggctctcagctgggcctgtggtgcgggcccacgggacaagcaacaagagaaggccaggattggctgtgatgtcctttctcagacaaccaaccatgcctgcagacaccaggcagcccctccccacgccaccccaggccagcctccagagcaccggcctcggtctaacccagggagagttggggccgtgccccgggggggtccagacaaagtccttcctaatctgcagcagggtggtgcctgagcagagcggaagccttgggctcaggacccaacttccattcccatttctacctcttgcatgctgagcaagctgaggccaagcacctgtcctctctgggcctaaccccccacccatcaatacaggaaagcgataatgctggctcaggaggcctcgcagggaggaccccaaacactaaagccgttggtccctgtctcactgcagaggggtcagtggcccaggaggccctggggcttgagaagctgactgcagggacctcccaaagcaccaaagctgtctgacaagtgggcagttacttgctggataaactagattcttctggggatccggccagtccctggccctagttttgagactgagaggggaggaagggacccctattcggttgcgctccctgagtcccttgggaatcaaaacaccgtgctctcatgagagcaggacaaaccacgcaggtcccaggggctccattcccagcacctggtcaaaagcttcaccaccttgtttctgctcctcccgcaatgcactgagatggggaccattactatccccacatcacagaggaggaaacgggctcagagaagttgataatttggtcaaagtcctcagatcttcctaagcccagagctcctccgggcccccagcctccagcatttcacacaggaacacaggaggccggagggcaggctctcccagggcacccaaccctcccccagggacaggcacccccatgtccctttccctctctcttgcaaaatcctggctcccctggtgctactggctgcccctgtcgctcccttcctccacatggccctcatctaccggcctccaactcaaacttccgtgcctagctcagtcttctgcacccgcccatgagcagtacatctcgtctcatcctcctcggcggcttcagcagctacaaggaatgtcccgcaacactctggagcccttttccttcacctcatctcagccgctcctgtgaactcaccctggccctgtcaccagctctaaaatctccattctaggcatcgattcttccttctctgaccactgccttcgtgccctctcctgttccagccacctctgtctcagtcctcccacctcaccgacccccagccgtgcactctcccatccctccctgcccatcaggcctcctggccaccccttcccttcctgtcccatccagcgtccctgcgccatcctccatccacgccttagccccaggcctcctctgtccccgaatgattccacatcctgtcttcgctgctgaaatgggttttgtcaagggcacggaccacctccacagtaccgatgctgaaggtcatttctgtcctcgtactgagcctctgatcagcatgggcatcctgcccgttctcttcctggcacccctgtctccaggtgccacacagggctgccattcccccgaccttccccatctccctgggagctccagcttggaaccttctcttcctcctagcgctaatgattcccagctctcgacttccagctccccgctcctgagctttggagctcacagcaagctccgcctcccgggttcacgccattctccagcctcagccaccagaggagctgggactacaggcgcccgccaccaggcctggctaattttttgtatttttagtagagacagggtttcacca[136 bp omitted]ggcggcagcacccacttgaggaggtgaccctcactcatggtgcacaagctgcaaacacaacagcccttggtctggcagaagagctccagcagctgcccggggcggggtcagcgcgcggcagggctggggccagggtcccaggtgccacaggcccgtcccctggtttgtcccactggccactgtgacctctatatgtccaaggccaaactctgccctccacctacgcctctcaggacatagcaccccagccacctgcgtgctcaagacagaaacccaggtgtctcccttgccgccctctctgctgtcccccgtgtcccctctggcctgctttcgcctccacaaggtaccacttcccctcagcgtttctcatctcctcctccatcttggtctcccttccctgatccccagctggttctttgcctccctgcactcctacccgattcgggtcttacatcctgcccccttcagcccccagccaggtgatcagtctccatgaagcccaaatctgatcatgtgccaacctgcttccaagcctataatggcccccatgaccctacagtaagagccagactcccccaggaccctgcccgatcctgcccctgctgacccccagggcctggcccacagatctcagtggcacaaatctgccactagggaccccgcgtgcccagttctttcccatcccagagacgggaccaggctgattcctctgcctagaatgctcttccccaggtctttctcctggcttgcgcttcctcaatcctcacatgccagcctgaaggcggcctccccttcctcctcctggcccgtttagcagggtcaccccaacccctctatcacatgccatgtgctttcctcactgcattttgtaataatacattcacgccttactggaacactgacttcttaagtggattctaagtctcttaagggcagggagctcgtctgatccatttaccaacagcccccatagccccctcgccctccacaaccccgcacagcgaatgaaaggaggctctcggagcgcaggagacacacgacggttctctagcgcttgggcacggagcagggagctgctgcctcacgcccaggctttgttcatccagagggcaccgagcagcttctgagacccaccctgtgtcactggccgggctgcatatcccagtctgatgcacagacccacgattttttgtttgtttattttctgagacggagtctcgctctgtcgcccagactggagtgcagtggcacgatctcggcttactgcaagctccacttcccgggttcacgccattctcctgcctcagcctcccgagtagatgggactacaggcgcccgccac[173 bp omitted]ggttgggagaagccccttacagatgaggctccccgcccccgccgggtgcccgagagagcagggcgcggcccgcaggagtcacccggcggtggccaggctgcggcgggtccggacccctcccgctcccggcggatgcgtcacctcgcgcttgaggcgctcggcatccagcagcgcccgctcgtggaggcgacactcgcgcacggtgcacacgctgcacacacagcggccctcggtccggcagaagagctccagcggccgcccgtggcgggggcagcgcgcggcagggtcggggccggggccgggatcggggccgggatcccgggcgggcccggcgcgcaccacctccagcacgccgctgagggccacgttgcggcgcagctcggcgccgtcgggaaagggctcccggcactcggggcacgcctttccgcagcggtcccaccagtcccggatgcaggccccgcagaagttgtggccgcagggcagcgtcactgggtcctggtagagccccaggcagatggcgcaggtcagcttctcctccagcagctgcgcggccatggcccggcggcggcgagagccaggcgggccccgggcgtcttaaagggaccgcgggcctcgcgcgctgagggcgcctgggcgtggctaacgcggggcggggcgagatccgggcggggcggggcgagatccgcgcccgggaaggcggaggggggcggcaggcccttctctgacaccctcgacgagcgaccgccgcaggggcctaggccacccctgcccacctcggcctggcccgctcgaaggttccgcgttcccgccttgcgcccctccctccgttagggtccacgccaccccggctgagagctgagttcggctctctagggtcccagcctggcgggtccatcccacccccctgggccttcagcccaggtcctggagaccagaggctcgaaaaccccgccaggactccgggcttctgaccacgggccgcgcggaacctcttctggactcatctgccagtcgcctaacagcatagacccccacccccaacaatcccccggggcttggcgatgaaacgggctggcgggctccctgcagacccgagcactgctgcactttttcctggagctgggtttcggacacttgccagactggggtgtctcccttctctgggctacacgtaattttggttcttttaaagtaaacagcgagatggaaatgtctggtcaccaagagacagggaccagttaactggtatttttcaaatggccctgaatgaatacacaaaccagctttcatctgcaatcagcatcccctcttcctgctgccctccgctggggagagttccttgcctggggtccaagctgatctgcagcctcagtatttacaggcactccagcatttcccctgaagctgagcaggcaaggcgggtctggggcctagcgcccacctacctgacagtgtgtatcaggccagggggaaccccaggagagtacggcctttctaaccaagctgggctgatgttgaggcggcacgagctctcactgctgcagcaagcactgcgtcctctgtgcggccatagacgaagtttctttctggacaaagtgcacggatctaccctccacctactagttagccagacttctgcttttggtaagggagaaacaaaacacctaaccatccagccgcaagactccatgggttttctgaccctgagcaggtctcttgagacacgctgttgcctacctaatgtggcttctcctcccaagcatggggtgggggctggagcctgtgcagagggtcagtgctcgggcaggcactctctctccaggggccggtgggacccccctgaggcacagagccagtgctcaataaatgctccttcctgagcccagctgctctgctccactttttcggggagctgggtttcaggaacctgctggattgggatgtctcccttccctgggccacacctgtttttggcccactgcctgcttttgcttcggatcccagggcccctgacaccctcagaagacggaggtgaggacgcacttagtggggtgggaggcagcccgtttcccacccatgaagctccatcggggtcctctggccctggagcaccgacccaggccagctatggcagaaatccctttttttaaaaaatacaggcagggtctcattatattgccagctggtcttgaactcctgggctcaagcgaccctcccttctcagcctcccagtgttggaattacaggtgtgagccaccaagcccggcaagaaatcatgtttattcacattccccaccccaccacctgagagtcactttcactccaagccctgggcctgacgggagggggccaaagaggggggctgcctaaggcagggcccagaccccacagtgtgggcctctggagctgtgtctttactcttgctgccgatcaatcccatgctctgaaatgcgcacactctggctccttagtagatgccataggtgggctcatgactgtccctgtaccggtccaggtagcgcaggggctgccggtgggggaagcgcttctgcttggggtggtaagggggcggccgcacgaactcaaacaccggctcccgcatgtctgcaagaagagtgaggggtacggggtggtctgctggcctgcgccccctcaggctgaggcctgcccaccagggacctgccgcagccttcccctaacaaagcttctccctggcagggcaggcgaggcctgggagctcaggcccacccagtgccccagccccatggcccttacccagaagctggtggaagatgtaggtgacggagtcatcccagcggcactggaagaaggacaagccggctggagtcatggtttcttggtgtttcttgtagaaatcaaaagtgcggaaggtccgctgggccagctgatagctatgagaagatagagagcgtatgagagtgtggagtggggcaccagagcccctcaccccgccaccccaacaggtaaccctgagaggcccctgggagtctgctagcaccctatcctgctcttctgccagtctcaaggctgaggtcaagagagaactgagcaagagtgaccgttccaggggagctggcctgaggccgggttatgtgtgggtggtgtagattaccagggtgaggggcgtgcgtcctcagagaagtcaatcggctggtcctgcttgaagagcaggaaggcaagacggtggatgccggagcctcgggcagggaagggggggaggtagggacacgtcacctgtccttcagccacccggttacccgggatgttggttctgggaggaggaaagtcccggttaattaccactccagggaggcagcaggagtgtcccctcagctccatgcacaccctagaggctgacatgactccctgggaggacagctctaagcatctctctcctgggacagaggaggcagccaagctctgtgaacgccgggacatgctgcaaatacgggaagcgggctggaggagctccgagtgggggacagggctccagagagcatcagcttgacagcaaggccatgcagccgcttccaggccccgggagccggtgggtccgccacagtcactgaggctagaaagccaggccacttttggctgcttttccctctgcgtcctgaagtctccaggacctcgtcagggagtgtgtgcccagcctggcacaggggcggccaacgcctcaggcacaaatccccagagggtcctgccgcataggctggtaacagttgaataaaaatgacggaaaccagcctcccagtcactgtccccagttaaccagaaggctcaaagttggggtcactggcctgacctctgccccctggcctggtgttcagagccaaaagctaccaagatggaaggccgcccagtctgggcccagggaaggagcgcccagtggttcaaggagcacctgggggacgccacagctgctaggcctctcccgctccttctcccacgtgactgtcacagtccacctcacgctgagtaaggcatgtggtgccattatcccagttttacaggtgaagaaatgagtttagagacgaagggcccaggcatggtggctcacgcttataatcctagcactttgggaggcggaggcgggcagatcgcttgagctcaggagaccagcctgggcaacatggtgaaaccctgtctctataaaaaaatacaaaaattagctgggtgtagtggtttgcacctgtagtcccagctactcaggagactgaggtgggaagagcacctgagcccaggagttagcggctgcaattagccatgattgcaccactgtactccagcctgggggacagagtgagaccctgtctcaaaaaaaaaaaaaaaaaagaaaagaaaagatgaggaggcttgtggggactgaccgaggcctactgcaaactttgtctcctgtagctgtcttcaagtagacacgtggatcccagggcccctaacaccctcaggaggcagaggtggcaggtgaattcaaggtcccatgggtagtccatgaaactcaggagcagctcagtccaggctcccagctcctcttcccgcctgggcagcaccccctacccccagtactccagtactcacagcagccagtggaggtactcagcatctggctccagcaggtgcccatctgcacaaaaacacacctgctgaccacggcccagccgaccacggccctgccaccccctcccttgttaggagccagcgctggagatctccacctggcccctcccccagccccccagggccctggctcataggaggtgagcggggcaggaggcctggtgagccccagacacccacccaagctagtgagtagcaacgtccacaaggagccctcttctgcctcataggtcacctctggcgcttgggcagcctggcagggtgagaaggaagctgtcagccccaccagggacaggccagctgttgcagggagccttggagaaaggggtgcccactctgacccaaaagcccttgacaacccctggcacaggcaggcaggcaaagggatgcgtagagaagcagccctgcagagttgcctgtccaggcaacaaccacaaaaacgaacatgtgccaaggccgggccaggagggcacaccacagacagcaggctggtcacaggaatgtgctaagacagagcctctttttccttcattttgttctattttctttgaaattgtcatggtgtcgtcttccaggaaatcaaagagacagagaacaacaaaattccaaacccaggagtgtctgtgacactgagatgggatgtgtctgtgtttgcacagggcagggaggaggggcacaagtgagtggttacctcggttggagtcacctcattgccacagtacacaggcatcaggtcatcctcacccacagcgtaggccacgtgcagggggactcggggcacaaaggtggcaccgtggaacaggtctcggtagaggccgtaatactcagccagacgctgcttgtggtaggggccacaggtcctctcccactcggcccgcacggcatccagcgggacactggctagacaggaataaggccagttgggatacgggggtggggggggcagggacacaccctgtaccccaactctgggatggcccctcccctgagaaggcttacctgtgcggaggcgggcagcccgctcctcttccacattggcccgaagctcctggatggcctgtttccgttccagtagctgttgggtccgggagactttgggtggaggcagcccaatatcaatcttctctttgggatctggagtgggaagatgtgtgggaaaaacagggtcatgactcactgcagccttaacctccccaactcagtctcctgagtagctggggctacaagtgtacaccatctcatctggctaatttttgtattttttgtagagacagggttttgccacattgcccaggctggtatgaactcttgggctcaagtgatctgcctgcctcagcctcccacagtgttgggattacagtagtgtgagccactgcgcccagccatggtagctaatttaaaaaatctgagagatgggatctcattatgttgctcaggctggtctcaaaactcctggtctcaagtgatcctcctgcctcagcctcctaagtagctgggattataggcgcaagccactgcacccagtgagggggcgggcacatcttcttggttaaactgcctgtccctacctagtcctctcattctgtgcttcaagctctgctgctcaagctttccctgtgattcacagaattaaaacatactgtgcagtctacttcccagacctgaataggatgtaactgggaagcaaa[267 bp omitted]gttttgtctaggtcatgggaaactgaagtcaatggtccttccaattatagttgagatcacctccaagcctgttcacaggtggctatgaacacccagctgtcctaggtagagtgaatgactgatgctagaaggacttatagaagtgcttctcggccaggtgctatggctcacgcctgtaatcccaacactttgggaggctgaggcagggggatcacttgaggtcaggagtttcagaccagcttgggcaatatggtgaaaccccatctctactaaaaatacaaaaattagctgggcgtggtggcgcatgcctgtagtgtcagctactttggaggcagaagcaggaaaatcgcttgaacccaggaggcagaggttgcagtgagtcatcgcaccactgcactccagcctgggcaacagagcgagcctctgccttaaaacaaaacaaaacaaaataataataacgaaaacatactgagccctcatcagagatggcattaggcaaaaatgccaatgaattgcctcttttaatcctcacagcaattttgtagcaaagacacaattattttattttacagttgaaacaagctcaaggacattatccgagaggctgagctaggatttaaatcgggctatttagattccacgcttgtgcctttaaccaccacaaaactgcctctataaatgctaaagaaaagaaaagaaaagaaaagcatatactccataaattgtaagttccttaaaggttggggtctttttttttttttctttttgagacggagtttcgctcttgttgcccaggctggtgtgcaatggcgcgatctcggctcaccgcaacctctgcctcctgggttcaagcgattctcctgcctcagaggcctcccgagtagctgggattacaggcatgcgacaccacgcccagttaattttgtatttttagcagacacggggtttctccat[140 bp omitted]ttcattcagcaaagtattgcacatgtacatccttgcactgttcgggtgcaaggatccaatggagggcaagacaagcaggatccctgtcaacagggcgcttacaatctggggagaggcagcgcacagtcagaatgcagtgtggccagagttacctacagagtatttgaggcgcacagaacggcatcccaatccggaaagtcaggtggtcaagattttaggagcaaatattttaggagctggaactctaatagtagggggagcgaattttccaagaatgaggtgcagaaggtgtgaaaaatcctggggtgattaagctgccgatagcgcacacaggtctgcaggcaggccctcccagcgtccccagcatccacaagggcgccggcaaggctcgcccagcgcccggggaaaacgccggcgggtcccgagttccccgggcggtggctgcagcccctgctccagtcgccccgcacctgtcttctccccgaaatactctcggtaggtccgccaccagtgcggggcctgcgcctcctgctctgctcggcgccggtagcggtcgaagctccggtacttctccagccgctccaggttgctcaagtcgatgtcactgttgggcatcggccccagcgggggtgtccggcggcccaggacggctgcgggcagagagaagacgtaaggccggcgccccacagctcgggcgacagcccccccccccccccccgcagagctgcccacccctcacccgaggtgctgaagccccgccatctccgacactcgcacagcgcggctcgccaccagggcgccgccatcttccctccggcctgcgacactgcggccgccactaggacccgggcacaggtggccagcgcggtgcctgagcgcaccacagcaggccccgcccctaggcccgcccccgggcccgcgctgcggagcaggcctcagacgcctgtcccggaggcccctgcaccgtctgcctcgggcgcaggtggaaggtggccgcggtctgtagacgcccggctccggaagtgcccgttggacggcggggcggagccgagagcagtcatatgctcgcccatggctggccaccagggggcggcacagaccggggtcggccgccggggccctcctccaacccctggacgctgcgtcctgatttccccagggacgcaggcctggttgggagaaggggtgcgagctccgattccggactctgcttgggtttaaaacccagattgagggctgggcgcggtggctcacgccgggaatcccagcactttgggaggccaaggcgggtggatcacgaagtcaggagatcgagaccatcctggccaacacggtgaaaacccgtctctactcaaaatacaaaaattagccgggcgtggcatacgcctgtaatcccagctactcgggaggctgagggaggagactcgcttgaacctgggaggcagaggcggaggctgcagtgagccgagatcgcgccactgcactccagcatgggcgacaaaagtgaaaactctatttcaataataataataataat[131 bp omitted]caaaaccctaaagatacaaaaatttttgtatctctactaatgatacaaaaattagccgggcgtggtggcaggcgcctgtaatcccagctactcaggaggctatggcacaagaattaacttgaacccgggaggcagaagctgcagtgagacgagattgcgccaccacctcggtgccagagtgagacaccgtctcaaaatgcccctccccccccccaaaaaaaaaccagatcgtgaccttactgtcttccttgtggtttcctcatttgggaaaaagcaggttaacactagtgcttacctgacagctgtcaggatgaaaagattaccctctggaaagcgctcgcagtggtttgtgtgttagctcaactatctccaacttctcattatccacacaaaggcagaagtgacctggttaagtgcagatgtgaatgtttctggcaggactcaggcttgcccttgtgatccagttctaccatggcaaaacttggtagcctggggaatctgggaccctcctttgccccagccctggccctcctgccctaaaaggcaagacttttccatcgcactttgcctccaggccacggggcctttgtatacgctgtgtcttctgcctctcacctcctcactgccccaccttggcctggccaccacccagccccaggagaggggtctctccaggaagcctgctctgacatcccaggccagggctggtggtgaccaggccagtggctctggcaccagcagaagcttgaccctcacaatcactttgagatggaatgagaatggaatgagggtctctccatccagcaggaagtggccacaccttccactggttttcataaacagcagccaaacagctaaacctttcacagtcatttctaatccacccagcagtgtgcacctgctacatgctaagtgtggaggggaatacgtggggcagtcacacccagtcctgctcgtaaggagttgcttattgtgacattccatactgcagttatgcagtacaggagcataactggattgtgtgtttacatcgtggctgttttaccttgtcctttttttttttttttttgagatggagtttctgtcgcccaggctggagtgtaggggcacgacctcgactcactgcaacttccgcctcccaggttcaagtgattctcctgcctcagcctcccgagtagctgggattacaggcatgcaccaccacgcctggctaattttttgtatttttagtagagacttggtttca[131 bp omitted]cttcagcctctaaacccacccgctctaccccacgaccctcccagccctctccagatgaagatgtatggggccttggcagttggcgtggaagctgctggccacccaggtggcggtgcattcctccattcttgtcctcttgctgtcctagaaccctgattggcgcttgcttggatattaacagtttgagagaggcttcacgtggattcccacgtgtaccaacttgaagcaaataacgatgaatatcttgaaactagaagcagtggctctaccattttaaaaaaatatatgggggtctcactatgttgcccaggctggtcttgaactcctgggctcaagccatcctccc[137 bp omitted]agctccgcttcccaggttcatgccattttcctgcctc[221 bp omitted]tttctttttcttttttttctttttttttttttttagacaaaatctcactctgtcacccaggctgaagggcagtgacacaatctcggctcactgcaacctctccctcctgggttcaagcgattctcctgcctcagcctcccaagtagctgggactacaggccacacgccaccacgcccggctaatttttgtattttcagtagagacggggtttcaccacgttggtcaggctggtctcgaactcctgacctcaggtaatccacccaccttggcctgccaaaatgctgggattacagacgtgagccaccgcgcccggccgcaatatttctctctctaaaaggaactgaatgaagcacttgggttatgatcttgtttacaattttgaaggaaaaaaagagctgcagctacacaacactcatttctgtactcagccctctccagtgtctgtggcctgggagaaggctgaaggggataattaggatgcctgccacaccctcatggcggtgacaggaatgctgagtgcttacactgagtaaagtgccattataactgagtgcctgtggaatgtctctgcttggctgtccccccggcactgtatactcatctgtgacaccacccagtcacccaagccaggaacctgggcgtcctcaacacgtcttcctttctgatcctccatgactggcactaggcccgagggccacttttctgtgggccctccctgccatgcccggtagtcttgcccacagtccctcccctgcaccattgccagctgccttcccacacatcctctgtcccactcttgccccctctggtccggtccccaccctgcagacacaatgggttttcttttgttgttgttttttttttgagacggagtcttgctctctcgcctaggctggagtgcagtggtgcaatctcggctctctgcaacctgtgcctcccgggttcaagcgatcctcctgcctcagcctcctaagtagctgggattacaggcacacaccaccatgcccagctagtttttttgtatttttagtagaaacagagtttcaccatgttggccaggctggttttgaactcctgatttcaagtgatccacccaccttggcctcccaaagtgttaggactacaggcgtgaaccaccgtgcctggccaatgggttttctaaaatacaaatatggttcaaccttgtttaaaatcttctagtgaagacctgaaaatttgccctcagacaaatttgccctgaaaagttgcacgtctttaacaagatatgcaaagccctctcattctaacctcttctccctactctgtcttgaaggccatgctctccccctgtgggtctcccagcaccgccctccccgatgtatgtgcttgatcacctgcaggtcctgcaggtggctgcctagataccagctgcccctgggccgacgtgcccatccttagacccccccagctctttgcacaggtctgcctcaggactggttgagtctcttttgtggagaatcaaatttgagacttaaccaaggcttccaatggggcatgtgatacttccctcctcagtgttggtaccagccccagaagcgcctgaaaagatcttcctcccacaccagcacctaccaggagtgtagcctgctcctctgggaggtaggagagcggggtggctgacagcgtggagcttggggattggccagagcagaactcaaatccaggcgcagctactcactgtcatttcaggcaggttatttaatctccccgggcctcagtttctgcatgtttgaagcagggctaatagtacccttctcctggctgtggtccagctgccaggtgccaccgcagaccgcaggtgctggaggggagaggcacgtggccagaggcgcctggtcctgaccaatcttataggctgatcttttaataagaacatctgcctgttctttgggacttgtccagcaaataacaggaaacattttctaagaaataagtataaactccgatgagccatggcaaaagcagtttttttaagcttagtcaagttgaagcagcgggagtggaggaggatcagagaaacctctgtagttgtgattggttccttgtcgcctccactgcgtacccgctgagctgggctttgggcaggtgagcagcacagaggcttccctcctcgtccctccccacaccccaccatcgccacagctccctccgccgccggtggggcacccagatggggaggaagctgaggaggccactgttcacccaaactggttggtccttcgggcaatgctgggaatagggtgggggctctgggcaagcccaggaggaggagggcctggctgagttccaggaacatctcacaccacaagggaggatctagctggtgccctccctgtactgtcaggaggccagagggcccttctccagctcatcagggagggaactgctctggcagggagtagggaaggctgtttgtggcatccctcaagaaagctcctgcctcagaagaggcccaggcaaaaagagcccacaacagtctacctgtggagcagggggagcccacagagcccagggggagcccacagagcccagtgagagctgggggtccttgctgccaactcagaccctcagatccaagccaatggctttggggcagggcagccaaagccatggtaagatagcctacaccacagagccccagaggcaggggctgccccgggctggcacatttggaaaggatgcacttgcaccctgtccacggaagagctgtcatcaggcctcaagcatctcagaatcctccccaggcactgcctccatggaggcagccggaggaacaggacagttctggggtccgaaccctctgttggggaatcggctggggtcccactcaggctgaatgagatgtcaaattgtaggaccctttcttcagggtctccaggaagaactgttcattctccaagaagtcacggtcctgcaaggcaggtttggatgggcggtcaccttccctgagctgagagggaggtggagccctggatgctagctgagccagccgtcactgaggcccctccccacatcgtccctgactctgcctggctctgggagtcagcaggggccatgaaagagcccaggtatggagtgagacagaccacagtctcaatcctggcaaggttacttgtttgctgtggaacttacgagcacatgacttcatgtctctaagcctcagtttccttgtctgtaaacattccttgtagcccttccttgcagggctgtgtgagggtaaaagcttaaaaaatacacaaagcaggccaggcacagtggctcatgcctgtaatcctagctaatccgcaggccaagggggtaggatcacttgagcccaggactttgagaccagccgaggcaacatcgtgagaccccatttctaaatataaataaataagtaaaatataaacaaagccttcggcattgaggttggcacacaggaaatgctccataatgacaactgttatcattatagttttgttttgtttagtttgagacaagtgccttgctctgtcacccaagctgaagtgcagtggtgtgaacacacctgtagcctcgaccagctgggctcaagcaatcctcccacctcagcctcccaagtagctgggactatagatatgccccaccatgcccagctaatttttaaatttttaatatttatttttttgagacagagtctcgctctgttgcctggagtgcagtggcaccgttgtggctcactgcagcctcgacctcccgggcttaagtgatcctcttacctcagcctccggagtagctgggagtacaggtgtatgccaccacgctcagctatttttttgtggagacgaggtctcactatgttgcccaagctggccacgaactcctgggctcaagtaatcctcccaccatagcctcccaaagtgctgggattacaggtgtgagccacgcacctggtcctctttttttagtttttcattttgtagagacggtgtctcaacatattgcccaggctggtctcaaactcctgggctcaagtgatcctcctgcttcaacctcccaaagtgttgggattacaggtgtgagccactgtgcccagcctgttatcattattgctataggttatcatgaggtttaactgagatgacatatgcaaattgctttgcacagaacctggcctagtgtggaagtctgagcattggctcactaagcaaactgcagttttactccccaggagctggggtcacccctccccagggctaccatgtgctcctccctgcctctgccctgagctggaaggactcgtgaacacaaggatccccaaggccaggagagactcacctgctctgccatgtgcctcagcagtgccagcctggcatggaggtgcaaggggctggggtccaggccagttggcggctggctgcaccaacgggtggtgggagcaggaggcatgagggctgaaaaggccaaggaggaagtcagggaccaaagtgttggtggaaataccgggcggtcacagcttgttcctgcagagctgctccccccgccagtgggtggaccctggccatatactcagggtgcaatggcactaactctcagaagcctctggcaaatgcatacctgctcctacctggaaagaccatttataggaatttattccagtgaaataatcaggcaaaggtacaaacacatatgtaggaagatgtccactgggtagtctttctctttaagacaacaaatcactcagcacagagcagcctcacagtggaaaactgtgctgattgggaattgactaaatgtttaatgactgatctgaaaacctgttccacgtgtacattactgagtaaaaaaagtaaagttattgaaaaacacatacaatcctaattttgtttttaaaaacatgtaccaggctgggcgcgttggctcatgcctgtaatcccagcactttgggaggccaaggcgggtggatcacctgaggtcaggagttcaagaccagcccggccaacatggcaaaaccctatctctgctaaaaatacagaattagccaggcatggtagcacatgcctgtaatcgcagctacttgggaggctgaggtaagagaatcgcgtgaactcaggaggtggaggttgcactaagccgagatcatgccactgcactccagcctgggtgacaagagtgaaactccatctcaaaaaagaaaagaaaaaaaaagtaccagagtggaacattatgcaccaaaatgttaaaagtgaaaagtggttctctcaagactcaggagtggcgttgagggtgactttttttttttttttttttttttaaacggagtcttgctctgtcccctaggctggagtgcagtggcacaatctcggcttactgcaacctccacttctcgggttcgagtgactctcctgcctcagcctcctgagtagctgggattacgggcacctgccaccacacccggctaattttgtatttttagcagagacggggtttcattatgttggccaggctggtcttgaactcctgacctcagatgatccgcctgcctcggctgccgaaagtgctgagattataggcgtgagccaccacgcccagcctgacaatgactttttttatttcctttttttttcctgagtccagagttacaaaaaggtgacatttttcataatagtgttcctctatttctgatttatctaaaattaacacacattatttgtgtaaaaaagaaataaggcgactataaaacccagctggccgccttaactggagcggctggaggagggcctgcccactcctagcactgcccctgcccagtcctgagccgccggcccttccttctggagccactcaccactctggctggaggctgcagggccctgggccctggggaacagacccacgaggctagagggcaggtcctgtcgtgcgcggtccagttgcagcctctgctgggccagactcagatgctcctgtccccgttcccccagaaagaaggactcagctgtgaggtgggaggctgggggtgccgggggcaggggcgccatacactcagggagccttgcctggtgcatgtgctgctcctgcttccgcagccgctcctgctgttgctgcaccgcctgcaaccgggcctgctgctctgcctgcacctgctgggcctcgcgcaatgcccgctccccctcctcgtacttctcggaggccacctgcagggaggccgcctgggtcagggctgcctgggctcagatgcgcccacgcccatgtgcccgagcagcaccttgctcatgctctccacctcctcggcgcggagcttgacacgcagggcggtggcgttgatcctctccttctccagccgcagctcctgccgctcctgctccagggctgctctctccgctgccagctgcttctcctcggcccggagctcgctggccctgatcttcagctcagcctgctcctggagacagcggaggccctgctgcattctcctcccaggaattgcgctgcactctgtgcaggactctagggtcccctctgcccaccctgcccctgggaggaggtggtggagccaggggcttccagggagagccagagaagcctggggccaagccggagtgctgccctcacaagccacgtgactgtggcaggctcaactctgaagttcggtttcctcatttctaaatgaccaaagtcatgggaacatgaggatcaaataaaatgtgtataatgcacctgggacaatacgaggaagatgttagcatgatgatgcgattactgttttaatccctatgctcttgtgacattagtgctacactctcctttcctaagactggaagcggatgtgtccagatggaggggcgcaggcaaccctgggccctccactgtccggaggctctgggccctaccttggccaggctgatgagggtgccctcccgctgggtgtccacctgcaatgcccgctcggcctcgcgctcggcccgctccttactcagcttttgctgcgcggagaactccgcccactcggcagccaggcgccgccgctcctccccgcacttgagcatgacagacttctgctcctccagcaaggcgctctgggatgtgggggtgaaggcacggggtgagtgtccctgggcataatggcaggggcaggggctgagtgcggtggcttgactcaccttggcccgttccagctccgccctttccatggccatctgctgggccgtgaccttcctttgctcctctagggcgcgctgcatggactccgccttggactgctcggcagtcacccgccagcgttcctgtagggcccagggcaggactgagagcgtggttcccgccctgaggatcacgcctggccactccctgagaagctgcatgaacccaccagtgtctcccacactatgccactgacacgtccttcccaaagaggcacaaaatgaggggtgcctgggaggcactgccagggcccagcccgcacgattctgcccaagagaaggacccagcaggtgccctcccaaccctcaggtctccaacagcaccaaggctagcagcttgggagggccaaagagcagcaacatccctgccgctgaatcgccagctacgcactctgcctgtcctcacccatcagccaagcaggctaagcacagggtggcttaatgctgtgctgtgggcccagccacacacagcacaaggcgagagcttcactgtgcctgaccccaggcagatgcttaacacagttaccaaatgaagaggcgaatcaaaatgcttcacaacataaaagcatctctatctacgttgacatggctacaggatagatatcaggtcagcagtggacatctctgactagtgggatatttttattttcttctttaaaaacatttttttgggccgggcacagtggctcagccctataatcccagcactttgggaggctgagacgggtggatcacctgaggtcaggagttcaagaccagcctggccaacgtggtgaaacccatctctactaaaaatacaaaaattagctgggcgtggtggcagttgcctgtaatcccagtagctcaggaggctgaggcaggagaatcccttgaacccaggaggcgaagtttgcagtgagctgagattgcgccactacactacagcctgggtgacagagcgagactctgactcaaaaaaaaaaaaaaaaaaaaaaaagtttttggctgggcatggtggctcacgcctgtaatccctgcactttgggaggccaaagtgggcagcttgtctgagctcaggagtttgagatcagcctgggcaacatggcaaacccccgtttctacaaaaaatacaaaaaattagctgggtatagtggcatgcacctgtgatcccagctacttggcagctgaggtgggaagattgcttgagcccaggaggttcaagctgcagtgggctgagatcttgccactgcactccagcctgagtgacagtgagaccccatctctaaaaaaaatttttttttttggccaggcatggtggctcccacctgtactctcaaaatgttgggaggcctaagtgggcagattgcttgagcccaggagttcaagaccagcctgggcaacatggcaagacccacatctcagtaaaaaatacacaattagctgggtgtggtggtttgcgcctgtagtcccagctactcaggaagctgaggcaggaggatggcttaagccaaggaggtcaggctgcagtgagctatgatcacaccactgcactccagcctgggcaacagagcaagaccctgtctctaaaaaataacagtgctttgtaaaaccttagaagatgataactactagctgaggacaaaaagataggtgggaggacaaggaaggctttgtggaggtggtagcatcgaaagattcattaccattgaattcagcctagaaagatttccacaggtaaggaaaaggatgtgagcaaaggcagggactgcaggtgtgcaccaccacacccagttaattaaaacaaaatttaaatgtttttattatttatttttttgagacagagtctcgctctgttaaccagactggtgtgccatgttatgatctccactcactgcagcctctgtgtcctagattcaagcgattctcccacctcagcctctctagtagctgggattacaggcgtgcgccaccacgcctggctagtttcttatttctttatttttagtttcaccatgttggccaggctggtctcgaactcctgacctcaagtgatcctccagccttggactcctgaagtgctggaattacaggcatgagccaacttgcctggcataaaaaaatttatttatggtctcgctaggctggtctcaaattctgggccttaagtgatcctgctgcctcagccccccaagtagctgggattataggcacaggccactgtgcctggctaaggtcatcattatttaaataaagcatgtgcttatatatgaaaggtatctagggaattcaaatgtctctgtgagagctgaagaggctaggatgacatttaatgggcaagagcatctgtcccaatgtcaggcctcagctaatgtgacagattcgagtgtcaggaagtgggaagtgcagctgatggttgcgggggctagactgcggagggcagccaaggtggccgaggggcttgcggtgctgaggagcggacagggcgtggtggggggcctggccaggcggcccctgcatgctcaggtgggcagtgctgagagcctggccagggcagggagatgtagaggcaggaagcggcaggtggggccttgacctcctgaggaagtgaggtcacgggagtgccgctacacttgcgggtgccctggagaagaggccccgtggcaggaggggcaggagggccaggaggacgggcctcacctgctccagcagccggctctgctcattcagccgtgcctccatcttcccgatgacctcctgttgccggctccgctcctcctccatgtcccgctgctgctggcccagccgctcctgcagtgctgggggcaacccacagggtgctcagcagctgctcccccttcccaccaggagccggggtggctgagaggggagggcgtaccccgcagctgctcgtcacgctgccggatccccagctcccgctcctgggaggtggtgaggtgcgaggcctccacgcgggaggacaactcgtgcaggctgctggagaacttctccatctggtggatgatgctattcagggacctggaagaagactgggtcaccccctcctgacggtctcggggaccttccggcccccaacgtcaggcgggcatggttggggcagcgcacataccgcgtgtgggaggtggcactggtggccgcatcgacctctcggtccttcagcagctttagccgctgcagctgctcctcgtggtctctgcgcatgtctaggatggacgccctgaggggaggcgggaggggaaggcggtcactctgagctggatcaccctgatgcggtaactccttgtggaagggtgtgtttccgtgcagcccttgctcccaggcctctcctccgccgggcactgcctcagtttccccagctcctctgtcttatctgtcatggtgcctcaatgctacacgcactaagatgggcattcctcccattattcagcttttctttttttggagatggagttttgctctgtcacccagagtctctcactctgtcgcccaggctggagttcagtggcatgatctcggctcactgcaacctctgcctcctgggttcaagcaattctcctgcctcagcctcccgagtggctgggactataggcgctcaccacgcctaattttttatattttagtagagatggggtttccaccgtgttgcccaggctggtctcgaacttctgagctcaggcaatctacccaccttggcctcccaaagcactgggattacaggtgtgagccaccacgcccggccccaagcagtctttctttttttttttttttttcctagagatgaggtctcactatgttgcccaggctggtcttgaactcctagcctcaagcaatcctcctgccttggcctcccaagtgttttgttttttaaatgtttttagagacagggttttgttctgtggtccaggctggagtgcagtggcatcatagctcattgcagccctgatctcttgggctgaaggtatcctcctgcctcagtttcccaagtagctggaactacaggagtagctgtcatgccagcttatttaaaaattgtttttagagatgaggtctca[131 bp omitted]ttcatcgacctctgactcccttaggtaacttttcttagtttccttctcttctagaaaggcaaccctataaacatggcaggcacaacagcgcaagcctttcccaggtggatcttgtttctagcctctactgcatgagcaggcgagtggatgaccctgtgcttagttagaccctaggcggcttgctgctgccatgccatgcctgaacagcctgtgggtaccccctcctgcctctgtaagagcaggtggcacccccacccatgggtgtgatgggtcagtgtgctcagccctcagtcctcactcactggactgggagggaaggacccaacccctgtccaaaggctgctgagccacagcgaagggtctcgtggggatggctctcttccggctactccttgcaagcctgctccccagctgcctgtccctgggcctcaccgctgcagctcccggagccgctccatttcctggtccttctcctgcgctatggccgccaagcgccgctggtgctgggccgtaagctcagcacgggcctgttcggcctcctggcactgcgacagataccgagctgacagctcttcgttctctctccggagccgctcctcccgttgctggtacgatgtttctagcaccttgatgcggcttctgccaacagaacacccagccatggcgcaaggaaggcagagggctgccgcctaaaggcctctccaggcacactgggtggcctttggggtcagtgtgagatccaaggcagagctggggccagcgccagggtacctgtgtgcactctcgatgagctccaggtctgcctggtgctgctgctgcagactccccagcagcagctcatgctgggcccgttctagctccagcttccgcacctgggagacagcaggagggccagcaaccagggaggggaggtggctgtactccacgctgccctgtgccaacagcccttcctccctcctggggaagcttccagccactctcagtgtcccctcctgtcgcaaccctgccaccagcaccaacggccccgctgcccctcacctgggcctccagctctgccagccgggcctggctatgcagcagctcggcctggagctcagcggggctgcactgaagttgcacctgtgctgccaggagctgcttctggtattctgtgctcggcagcaggctccgggccagggactctgggagcaggggctggaggagaggaagagaggtgtttctagttagggaggggacaggggcccagctgagatcagctacctcctggcccactgctcactggacctccctgcatctgatctgtggctgcagatggggccaaggccttggaaagtaacagtcactgcggctaagcagtccccagtgtacctccccttgcagatctggtcaggagcatgtctccctccaccctccggaacagcttcctccccagcatggtctccggcttcccagacaaatggctgaaccccagcagagtcttcgctatgacaaaagctgatgctggcttttcctgtcaggcctgaagcccacatgttgacactaatctggttcccacgagctgtcccctacccaccatctcccagggacacactcctggggggggggggggcacacctcccaggcccaggtgtcacaggtgactgccacacatgggaaacagaggcagaggtgtggtgggaggatggcaagggtggaggaggctttcttgacagaacaggaccctgcggccctgctttctgactgcagcatcccagctccccggcctggctgcctccttaaactccccactgatgtaggcaaattaacacccagctctgcccaggagcagcgaggctagaaattcaggcaagttctagtggggggtgcccggggagctggctgacgtcacatttggtatgtttgacacatttttcctggcaggtcgtcaggtcaaactgtgggtattgcccctgggcatggagaattgctccctaggccctgagctagacctgtctgcccacacccctacctggacgggcacggaaggctctgtgggtttctgggtgctcgggaaacacgtggcaggctctgaaacatcaacaacagagaaatgaacaggaggcccagggcactgggcctgcgagtgtccaggaggggctggtgtaactcatgtcccagggaccccaaaggaagctcaaagcacctcttcctcacccagggttaaactcccaaatgaagcagcaaacaaaaaacaaaccagtggctgagaggtctccaggggctgttcccctctttggggaacctgtagggagtgctgaggcggcatggttctgagtcacaggggacctgaggacacagggatggggcatggtgagcagcctctgtgtgggacacggggacggggcagggtgggcagcctctaggtgggacatggggacggggcagggtgggcagcctctacgtgggacacggggatggggcagggtgggcagcctctgctgggacacggggacggggcagggtgggcagcctctaggtgggacacggggatggggcagggtgggcagcctctgtgtagggcacagggacggagcagggtgggcagcctctgtgtgggacacggggacggggcaggggcagggtgaacagcctctgtgtccctctctcaggacagaggcctgtgctgcccaccatgctctcattcccactcagcccgcagcccaggcctaccccgagacaccaggcctgacacacggtctttctcgtgcagttgttccagaactccctccagcagctgcgtgctcaagcccttgtgtgctggtgagaggttggctgaggaaaggcagcgttcaaggtgaaggtgacagaaggcccaggtcaggctggatgaagacagggcccaggacgggcttcacacgtgaagctcgtggccccccttcctcctgcttccaccatcccgtcttggggcattctcctcccacgtctgagctcctgggatttctgggcatctcttcccttccagtacccccttcctgcctcaatgtccacagtggtgcagtgaatggacactgtccaagcagtgacaacggaaatgttatagacactggagtcaagttcaagttcagagccctgttccagtccacttaacttggctcagctctagattaggattctgctcagtctaccaaatctggctggctccctttcccattatttccacctctttctcggctcacgggtcagtgaagagacaggctcttttctgttttggcctgagctttcccctcggcctcaggtcaaagtcaaaactgccctcctgtcatcaaccccaggacagggtgatgtccctgggctgtcacaaattgcccagttcactcccctgggctctggccacagcacatctcaccacttcctctggactcccccagcctgctggccccttgtgccttcctgccttcagaggtcactcgctatcctgccccacggataagggcttctccaagaggcgcctctcggccactatgtctcctctaacactctcaaagagcacagggacatctcagctcacacacgccatactcgcttcagtggagtcggcagaagcaccggctgtttggatgccggggcttccagcctgagggcgctgtgacagggcagcggtgtgtctgccacctcagggaccctctgtcttctcctcgatcaagttagcacctgtccccatggcggtcagggcatgaatgtcaacagccctccttcttgggtatgtccctggggcaagcctgggagccagaggctctctctgcagtgcctaaaaggcagagtagcaaagccaagaagcggcctctgtggccacggcgccctgccttgttccccaactgctgactgaggctgcaacaggtgaaggggcaaaggggctcctcaagtccccagccagtcctccccctactagccacagcagcctaagtcagtacctgccagaagggggatggcccgctgtccccgccaaatgcaggccctcagaggtcccagcatgctgctctctggccaggccttgggacttcttccgagacagggcatggctcagccagtcctctttctcctccttggaggctcgcagcttggaagcctggctggctttggcaggggaccctgcaccttcagttggtggctttgccctggaggggggcagcccagctggcgtggagtgctggctcgcaggaggaggcactgagggcgtgacaggcactgaactttcccgatgggcctctctggtgggtgaggcagggaacaggtccaagtcctcgtccttgaggcccaaccagtcagctcctcccttcctgggctggatggggctggaagccattggagggctctgtttggagcctggttctcccttggggtctgcgccactgtctgcgaagaacctacttcaagacagaaaggagggtgtcaggcaggggaaacagccagtcccagtggccccctagcagcctgcagctgggcgtcacgatgcccagggaccctgcacagtcagctgaggcccagtgagcagtggctcctggaccggctcaggtggcaggccacgtgctgtctgtagaacaccacgaagtacagagaccttgacttccatcacatgaaccagggacagttctacccacagagaacaggaacaggatcaaatgacagccatgggcacacaggtctaaagaaaaatcaggccgagcacggtggctcatgtctgtaatcccagatctttgggaggccagggtgggcagatcgcttaaggccaggagttcaagaccagcctggccaacatgtgaaaccccatctctactaaaaacacaaaaaaattagtcaggtgtggtggtgggcgcctgtaatcccagctacttgggaggctgaggcatgagaattgcttgaacccgggaggcagaggttgtggtaagccgagatcatgccactgcactccagcctgggcgacagagtgagactctgtctaaaaaaaataataataagttggatcaagtggtttccaggttttccaacaacagttacttcatttgttcggccgtggccttcatctgtcactgaccagtggcagcaggttcccagggttaagaacgtactgggtatgggaagtaatgccgatgtgcttagagctattcagatagaaagaggatgaagaagccaacctggcaaatgggaacaactgctgaacctgggaaaggatgagaggggctcctggtgctgttcttacaacttctgaagtttttttttgagacggagtctcgctctattgcccaggctggagtgcagtgagtggtgcaatctcagctcaccacaacttccgcctctaggattcaagctattctcctgcctcagcctcccgagtagctggaatcacaggcgcccaccaccacgcccagctaatttttgtattttcagcagagacggggtttcaccatgttggccaggctggtcttgaactcctgacctcaggtgatccacctgccttggtctcccaaactgctgagattacaggcatgagccaccatacccagccgacttttgaagtttgaaattacttcaaaatacaaagtttaaaatatatactggcaaaagaactccaaactcagaaaatcctatcactgatttaatttttttttttgtaaactgagaggatcacgctgtcagaattgtcacggcaggttcgacagcagagttcctgggaagcggggtctaagaagccaccgcagatgccagtggtcttgctacccatcaggaagtatgttccttggggagaccgagcgacatcacagccttttatgatttcaggggctttaggtggaggcaggcccacctgcccctttccttctgaggctgggtggggcactggcgaacctgagcagcgtctgggatgggggttcccactggggccatctcctccactctgtctgggctggcgggaccaggccatctcccgcttccttcagcacctgcagagctgagggccttgtaccctgtggcctcccacatgagactctcgggtgggacaggggacagctgcaggggcctgtcttcccagtggccgacctgtctcaagaggccaagcctcctgcaggccccacttacctgacagactgccggcgggactgccggccctcagaggagaccacagtgggctgataggctccaaaggtgaagtcctcgtcaccccacatatcttcactgtctgtgaattaaggagcctgtgaccgtgatctggagtaggggaaccaagctcatttgcggctgcaaaattctaacaaaagctgaatttggtagcttgttgtgtaagacaagcagagggaagctgctgtgaagggagcacctcaggcactggccaggaagatgcagtggccttgcagtagccagaccctgccccaggatccctcgaggtcaggtccagcgagcggcatgtgtcacaagaatgattctcagcagacagcttgtgggctgatgctttgagaaacatgtccagagcagtgcttttcaaatgcgagctgctacccatgagagggctgagaaaccagcttaatgtgtcacagccagtgtgtttccaaatcaaacagcatctcaatcatagacaactgagcacgaacagtggtcacggtaagtattatttcacggtaagtattattttgtctcagctatagacgtgtataatcacatgtgtgtatcaggatgtgaggctgatttctcattataggttgtgatgaaagcctgatctagaggcctccctcccgtcctgttgcggcccccgcaagcctccttaccctgtggcctctggtacttcttgtctagcttgaactccctgtgctccccggtgcccgggcgggccaggagtttggtggccatgcctcgacccagcagctcatccagcgtggagcgagcagggcgaggcccttccctgcaggacgggacacacggcaggaacgtgtaggtatgaggggctctcgggaatcccacagtacccgtccaccagcttttccctgaacctgaggcagcagcctggcctactcagggatccttactggtctcctatctgcctcttctctgctttggggctgtctccaaaccccaaggtggccatgatgtcatccccatcatcaaacaacaattcttctttttttcggatgggggtgtccccaggagttagaggaatagagggacctgaaagacaaaacaaggcccaatgcctgcagccttcttgccctcaactgtgatatctgaatggggttgggggtggtttctctgcacctttgggtaggacgacaggctttagacctgcctggtctgtccacgggacccaattcctccagcctactcccagactcacacgtcctaccttcctattcctaaaggctgatgatctctttgtactggaccttagacctctggtccccacctgggagaggcctctggttctgcaccagaaaggctggttagcttgttgccaataaactcttcctccaggatgggaaatgagcccactccaccctaccttgatctctcactgtgctggggctcttgtcagaagctgttttactctgtgtcacaggcggctgcttggtgattcctccttcatcataggagagaagtcctctcaatgggtcttccaagtctcacagcagaagggaaagcacaggtcagactgcagcacttagttgaggaaaagcaagcctgaactggggagcagcgctcgagtcaaggcttctagctgctccagtacataaacaagccccctggcatctggagggtggggcctggggcaacggggactccacaaaaagacaggccgggcaaggagagagggagttggagggcggccctggacctacggggcctgcctcaggcttgccggtggggcctctgactctgcaggctgcatggccttctggaaatgtccctcaagcatcagaagagaagtaaaatatccacacattcatgacgggaaaggggctccttcctatacttgggaagatcttcagtttgatgcctggctttaaggtctttgcaaataagttccctaatatctcagccaatacaatatagctggtcccgacatgaattcacgaggaagtaaaccagtggcacccatgtgacataggcagcagctgggcctcgggccagcaagcatgcctaggctgctccactcccaaaccagagtgtcccagaggcatgacaggagcctatggtaccttcagaggaaaacctcctgttctgatgcccagagctgctgggagacggaagtgacttcttggtgggaatggcaccccctgcaggaagcagaagacaaggtcatgggcctgagtctctcctggccaaagtcctcctcccatatcatggactggggcccctgggatggggtgcacttcttcctgggaagctgggggctcatggccatgggcacagccaagggaggagtctccagttctgccatgggcttctggcagggaaacgaggtaggagctacctctgcttcctcatcatgagtcactccagagacatgggttcaggagaggcacaggctgccatagagttctccattttaactcacacagcttctccaggagctgcccatgttggacccagagggcctggaacagctcgaggaagggaggaaactcaagctgtccccttaccccaccacacacactcaaacacacacacgcacaaatgctccttggcctctccatcctgtgcagagaaaacccaaggacatgaacgcttcctactagcatcttccacgtcctcaaagtctccctagcagatgcgaggagccgtctcccatgcacctttctcactggctactgacccacctgcaggcttggggtggttgggcagctctcctttcccagggtcctttgcagcttttttgctaggggctgaattagatttcttcagacctaagatatcagcatccatgccgtccaggtcctagaaaaccagggagggagggcagaggactatgtctgataaggggctgaggacttccacctgagagagatgggctgttggcaccccaggtgtagaattgtgagaaaacaaaggaaaatgagaaaactgttgagaaaaacagtgagtgaagaaagaaaatggaactaaaggtaagcagggggaggtggaatggagtccagctcatggttctgggatgagagactcaaagtcagcaccaaaaattgagtcagaggacttgtgggttatgcccagggatcctaggtggctggtctcgggaaaaaagctttcttttttttctttttttagacaggatattggccgggcgcggtggctcatgcctagaatcccagcactttgggccgaggcaggtggatcaccaggtcaagaaatcgagaccatcctggccaacatgatgaaaccctgtctctacaaaaaatacaaaaattagttgggtgtggtggtgcacgcctgtaatcccagctacttgggaggctgaggtaggagaatcgcttgaacctgggaggtggaggttgcagtgagccgagatcatgccactgcactccagcctaggcaacagagcaagactccgtctcaaaaaaataaaaataaattaaaaataaaataaaataaagacagagtctcactctgtcacccaggctggagtgaagtggtgcgatcatagctcattgcagcctccaacttctgagctcaagtgatccacctgccatggcctcccaaagtgctggcattacaggagtaagccaccatgccagactttttttttttttttgaagacagagtctcactctgtcaccacccaggctgtagtgcagtggtgtgatcatagctcattgcagcctccaactcctaggctcaagcgagcctactgcctcggcctcccaaagttctgggattacaggtgcctggcctttgaggagaaagatttcaagatgagattaaagaagctgaatctggaccgggtgtggtgcctcatgcctgtaattacagtattttgggaggccaaggtaagagaatcgcttaaggccaggagtttaaggttgcaatgagatcacaccactgcactccagcctgggtgatagaatgcgatggtgtctctaaaaaaaaacccaaaaaacaaaaatacacaacaaaaacaagagccccacagggctgtaaccaaaaacgcggctttgtcctagggactgtggcaaaatgggttaactaaaagggacacaaaaccccaagggtcagacaggaaggtgctgctggctggaaggagagggagaacaaggtgtcttaggccaagctagagattatgtccttacaaattattcagaatctgtgccttaaaaatccattgcaaagattggcgctgggcttgatctgatgagaagacagcagtattgaagggggcttggcaggggatgtggagagaaatatggagaaagattaagaacaagcattagaggaaagagtctccccctctgtcttctaggtggaggtgaggggacccagctaggtgggcctccgagtagagctggccccgtttccccagaggcctgtggcactctccactctctatataccaggaacactggttgatactcagaaaggcaaggaggccaacggctcacagacgagttccatgcttgcacgaggaagggctcagaaacacaggttgtaaagggagaaattagaaggagaatgaagctttggtacaaaatatcatgaccccaccccacccacccccagttctaagaatcgtgcaagctgtttccttaccttcatggcctggagcagagcctgtgggtctgcctctgagatacctgaaacctaagtccacaatgagggtgaggacacagatgaggaggcacattagtcaaggcccaataaaactcagggtcctggccccttgcttctgttagggcagacggcgcggcaggagcagagcttggccaatggagcttacacaggagggtggctttgttccccttgcttgggcttggcagttgtttgaagccaaacctgcctggttttagagactcagagagcactgccattcctactccttccaaccatagagaactcttccatccaggactgaaattctgctacttcccacccatgccaatggacagctatggagtttataaggggaaaggagcaacatctaagactctagcagtttcagggagctctcctttccactcatcttactacagga[221 bp omitted]cagcctgtaatcacagtactttgagaggccgatgtgggtggatcaagaggttaggagtttgagaccagcctgaccaacagggtgaaaccccatctctactaaaaatacaaaaatcagccaggcgtggtggtgggtgcctgtaatcccagctactcaagaggctgaggcaggagaatcgcttgaaccaggaggcggagattgcagtgagccaagatcgcactactgcattccagcctgggcgacagagggagactccatctcaaaacaaaaacaacaacaacaaaaattagccagtcatggtggcaggcacctgtaagcccagctacttgggaggctgaggcaggagaattgcttgaccccgggaggcagaggttgcagtgagccgagatcacaccactgcactctagcctgagcaacagagggagactccatctcaaaaaacaaacaaaaagaacaaagtgactttgcagggacttctaaacccttccgtgggcagccccttggccacaacacccatctcagtgtttctggggataagtagggaggtggagggaaacagccaggctcacctcagcatcagcttcttccaggcctgccatggtgctgaagacatcatcacccaggagggacctgcaaaggggaggcgtcagcccctacctgcatcccagggcactggatgactctaaaaaggggaggagtagcttagaaagcccaaggaatctcggataggtctctccggagaacagaggtgctaaaaggaatgtcacaggccacctgatgcagtgattttcaactttgttagcagtagaact[133 bp omitted]gaaaccccatctctactaaaaatacaaaaattagccaggcgtggtggcgggcacctgtaatcccagctactcaggaggctgag[132 bp omitted]ctgctccagatcacaagagggaggagggctcagaaaattcctccctatctctcatctgtggggtattcattcttatcttagaagaacaaacacaatttgaaaatcactgatctaggccaatcctttaattctgaggataagaaaatgagggctcagagaagttcagaaactgcccaaggtcatatcataagtaacagatagaggatagaagccaggactgctgaccttttgtgcagttctctttaacttccccaggctccttcaataaaaccaggagctggccaggcgcggtggcgcacgcctgtaataacagcactttgggaggccaaggtgggcagatcacctgagatcaggagttcgagaccagcctggtcaacatggtgaaaccccatctccactaataacaaagtagccagacgtggtggtgtgtgcctgtaatcccaactgcgtgggaggctgaggcaggagaactgctggaacctgggaggcagaggttagagtgagccgatcgcaccactgcactccagcctgggtgacagagtgagactccatctcaaaaaaagagagaaaataaaaataaataaataaataaacaaaaccaggagctgagggaagtgggtggaaattaactgacattagaagtgagcacggccaggtgcgagtgactcacacctgtaatcccagcactttgggagactgagtggatcgcttcagcccaggagttcaagaccagcctgggcaatgtggtaaaa[137 bp omitted]aaccttgtctctactaaaaatacaaaaattagccaggtgtggtggtgggcacctgtagtcccagctacttgggaggctgagacaggagaattgcttgaaccggggtggtggaggttgcagtgagccgagatggtgccactgcactccagcctcggcaacaaatattctctaaaaaaaaaaaaaaaaaaaatggcgagcaaatgtgaagtagaaagtggggggtggaggggcagagagcatttagactgaagtaggtcatggatacccagtcggaccctgcccttactttgttctcgcctttgaagaagggaacatctgagatacacctgtggtgtctctggtatgtgaagctagtttaacaggcttctcaggtagtgtcactggaaaaaaagaaaagagaaaacgtgtcatttaactaaaggtacctggagtcaagatgcaaaggctggcaagctcccttcccaagctgtctctgtattaggaggaagaaatctggccaaataggcaggtcccaatgtcaccccttggaaaacctgaatgggagagagggtggtacatttccaaggaggaagtcaaccctaaatgccaaataccaaatgaagagcccaacccaacccaacccaactcaatgcaccccaaggaaatgcatgaggaacaattgcttttccacagcccaaaactgtaggctggaatacatgggctggaatacattagccaggcgtggtggtgggtgcctgtaatccatcccagctactcagtaggctgaggcaggagaatcgcttgaaccgggagacggagattgcagtgagctgaaattgcgccactgcactccagcctgggtgacaggagctttgtgggttctctggggccatgtaggggaaacctaagtctctctgtccctggtgagctttacatgaccatgaagccaggttccttaatagaccaacacgaacacaaataatatggattagcatccagaatctacaaggaactcttttaactcaacgataaaaagacaagtaacccaattaaaaaggggcaaaggatctgaacagacatttctccaaagatatacacgtggccaataaacacatgaaaagatgctgaacatcattagtcattagggaaatgcacatcaaaactacaatgagatacccactttacaccctctaggatggcaatcatcaaaaagaaggaaaacaagtattagcaaggatgtagaggaactagagccatcttacactgttggtgggatgtaaaatggcacagctgctgtggaaaagcagtctcctcaaaaagttaaacatacagttaccatatggtccaggaattccaaatgaactgaaaacacatgtccgcccaaaaactagtacacgaacgttcataacagcattattcataacagccgaaatgtggaaatatctcagatatccatcaactgatgaagggattaaacaaaatgtgatttatctacacaatggaacattatctagccataaaaaagttaaagtactgattcatgccacagtgtggataaacttggaaaatattatgctacatcagagaagctacgtgtgctaggcatggtagctcatgcctgtaatcccaacactttgggaggctgaggcaggtgtttgaggccaggagttcaagatcagcctggccaacatggcgaaaacccatctctactaaaaatacaaaaagtagctggttgtggtggtgcatgcctgtaaccccagctacttgggaagctgaggcacgagaatcgcttgaactcaggaggcagaggcagagccgagatggtgccactgcactccagcctgggtgacacagtgagactctgtctcaaaaaaaaaaaaaaaaagctagatgtaaaggtaagatgctggccgggcgcggtggctcaatacctgtaatcccagcactttgggaggccaagatgggtggatcacctgaggttgggagttcgagaccagactgaccaacgtggagaaacccccatctctactaaaaatacaaaattagctgggcgtggtggcgagcgcctgtaatcccagctactcaggaggctgaggcaggagaattgcttgaacctgggaggtggaggttgcggtgagccgagattgcgccattgcactccagcctgggcaacaagagtgaaactctgtctcaaaaaaaaaaaaaaaaaaaggtaagatgctgtgtgattccattttatgtaaagtgtccacaataggcaaatccatagagacagagagtaaataataagtgcttgcctaaggttggagggaggagagaatgaaattgactactaatgggcatggggtttctttaaggggtgatggaaaatgttccggaattaggtaatgttgatggttgtacaacttttgaatattcaaaaaccactgagttgtacactttacaggagtggactttatgctatataaattacatctcattttttttttttttttgagacggagtctcgctctgtcgcacaggctggagcgcagtggtgcaacgttggctcactgcaacctccgcctcctgggttcaagtgattctcctgcctcagctttccaagtaggtgggattacaggcgcccgccactatgcccagctaatttttttttgtatttttagtagagatggggtttcgccatgttggtcaggctggtcttgaactcctgaccttgtgattggccctcctcctcctcccagagtgctgggattacaggcgcatatatctcaatttttaaaaaaggccgggtgtagtggcttatgcctgtaatcccagcactttggtttaggaggcgggaggatcatttcagtccagaagcttgggaccagcctgggcaacatagtaagaaaaaaaagcaacagcagcagcccaaattaggggattctgggcaaggcacacttactatcatcccctagaaggtcaccaagaaaatcatcaatggagcctggaacagaaaagggactgtcatgacttcaggaggaaagaagagtggcccttataaacatcaaggcttgagactcgccagaaggcgtcagacctttcagatgttgggacttaggcttagctctcctttcattggccacgagatgttttacaagtttctggcaacaagtcacaaagccttgttgaaataccccgag[138 bp omitted]tttactaaaaatacaaaaaaaatggctgggcgcggtggctcacacctgcaatcccagcactttgggaggccaaggcgggtggatcacctgaagtcaggagttcgagaccagcctggctaacacagtgaaaccctgtctctactaaaaatacaaaaaattagccaggtgtggtggcatgtgcctgtagtcccaggtactcgggaggctgaggcag[131 bp omitted]ctggtggcgcatgcttgtaatcccagctactggagaggatgaggcaggagaattgcttgaacctgggaggcagaggttgcagtgagccgagatcgcgccactgcattccagcctgggtgacagagcaagacgccgtctcaaaaacaaacaaacaaacaaaaccaaaacaaaaattagccgggcatggtgacacatgcctgtaatcccaattactggggaggctgaggcagaagaattgcttgaaactgggaggcagaggttgcagtgacctgagatcacgccattgcactctaccccgggcaacagagcaagactccgtcttaaaaaaaaaaacaaaaaaacacaactatctgaaaggatgatggtgcagattttcagcagaacctatattctacctgcctaccatgacacactggccaaagatcagtcttccagaccctgaacacagcccagtgcagctcgctgggaagagtgcccaagatttctaggcacatggaggctactttcagacaagtaggctccttgtacccttccatctaagaccccccagaactggtctggatgtcctcatcaatggccactttctgatggaggcatgtgggggaacctaagtatgaatatcgaattcgtttccccacaccagctttcccaccctgaatcccaaccacatatttctggatacagagcccaaggaggaggattttttccaaaacctcatatcttatttacgtctgaacttctctgaggaccagtgaggcaacataaggaagaccaaggctgcctacggaataatgggaagaacagcaagactgatcaaaaacattttttttttttttgagacggagtctcactctgttgcccaggctggagtgcagtggtgagatctcggctcactgcaagctccgcctcctgtgttcacaccattctcctgcctcagcctcccgagtagctgggactacaggcacccgccac[131 bp omitted]caccgtgcccggcccaaaaacatttaaataaacacatctcattgttccaggaccaaaggggaaaaagatatatatttggcttaagagtaatgttccatctctccactcacctttacatcctttcttggtttttggtgcctaaaatgggaaaaacaaatcacatcaagaaaaccaaacagtgaacacaggtggaaattggcaatgcagaatgaattgcgttgccttttgccaagtaaccagaggcaagagcaccaatggcatttagagatgtaagtcctttatgtgttcctatagtttctgagaacggactcattcagagcgtggaaacagccctgctaaccagcgatgggtgccaatgggcgggcaggtcactcctttcccagacacgacatgcaaaccctcccagccgagatgtcatgtgaccggaaatgtcttctattccgtgcccctgactcctcaataccagtgacagacacttaaaaacgcttccagctggacactcagagtctcagaagaaaccttggtcgtcgaaagtttggtatcaatgccacctcctgtcactcttctccagggtctccatcctggtccttgccgcccagcccccagagtgttgcatgcagtcaagatctttggggatgcaggatgggaggcatgttcgctttccatgcatcttactctgaactctgcctaccatctcacggctctcgggggtgctctcagctccttcacagcactggccagctcatctggattctgcccacatcaggctcatactccctaatgaagaaaattaaagtggttgcttaaaaatgatgtagctttggctgggcgccatggctcacgcctgttaatcccagcactttcagaggccaaggcggggggatcacctgaggtcaggaattcaagaccagcctggccaacatggtgaaaccctgtctctactaaaaacaaaaattagctgggtgtggtggtgtacatctgtaatcccgcagcaggaggctgaggcaagagactcgtttgaaccggggaggtggaagctgcagtgagccaagaccgcgccactgcactccaacctaggcaacagagtgagactccatctcaaaaaaaaaaaaaaaaaaaaaagagaccgggcgcgatggctcatgcctgtaatcccaaaactctttgggaggccgaggcaggtggactacctgaggtcaggggttcgtgaccagcttggccaacatggtaaaaccccacctctactaaaaaatacaaaaaattagctgggtgtggtggcaggcacctgtaatcccagctacttggcaggctgaggcaggagaatcgcttgaacccgctagacggaggttgcagtgagctgagatcatgctatgcattctagcctgggcaacagagcaagactccatctcaaaaaaaaaaaaagatgtaggtttaacagcatgaatccaagggttatcaaagttctctcactttgcccattcaagaggtaaagcccatttccataaattaaaaattccttataggggatgcacttcagaagaggagcaaagtactctcaggctgggcgcggtggctcacacctgttatcccagcactttgggaggctgaggtgggcagatcatttgaggtcaggagttcaagaccagcctgaccaacatggtgaaaccccatttctactaaaaatacaaaaattagctgggcatggtggcatatgcctgtaatctcagctactcaggaggctgaggcaggagactaggttgaacctaggaggagaaggttgcagtgagccgagatcgccccactgcactccagcctgggcaacatgcgagactctgtctccaaaaaaaaaaaaaaaaaaaaaacgtgctctggataacttaatgggctttctgaggctttgagattacttgaaaaaagggcagtggccatcatcccttaccctgaaagccgatgcagcaagtggcaagtactcatttcagaaaggaggtgggtgcctggcaccaaggctgaaaccctttcccaggcaacacccatgactactttctaggcagcatttagcacaaaagcaggtatgaactctggttactctttgatattctttttctttttaaaattttttttttcgagacggggtctcactgtgttactcaggttggtattgaactctggggctcaagcaatcctcctgcgttggtcttccaaagtgctgggattacaggtgtgagccaccacgtccagcaacacgattttcactgacagtggaaatatttccctttacataggcagtaaatctgacccattgagaacattttcctcggaattagctgtctccctccccctcctccactttaccaaaacccacctacaggatgtcctggaagaaaggagtcagaggggtcctctttatgtcccaagtattggcctgtcctgttattggaatgcaagggttatctgggcttacctacagagcccaccctgaatacatgtgttttcttttttttctttttttagacggagtcttgctctgttgcccaggatggagtgcagtggtgcgatcttggctcaccacaacctcagcctcccgggttcaagcgaatctcctgcctc[132 bp omitted]cctcccaaagtgctaggattacaggtgtgagccaccacgcctggccttctttcttttttttttttccagacagggtctcgctctgttgcccaggctggagtgcagtggcacgatcacagctctcatagcttactgcagcctcgacctccttgggctcaggcgatcctccaatgtcagcctccctagcagctgggaccacaggcacacgccaccatgtgcggcaaattttaaaattttttttgtagagacgggggtctccctatgttgcccagggtcgtcccagacgcctggcctcaagtgatcctcccgccttggcctcccaaagtgtcgggattacaggcgtgagccaccgtgcccggccttgtttctttttctctgcaatggcgacttcacgacctacaagtccaaatgtgtcccataacacatcaaggaacttctggcatctcctatcgatcctgtacgggcttctcagactatggggattttctaggcttggtttgccaaggccaaagggctacagagtaaccccgtccccacatgtattcagccgactccatgccaggcgttttacagatcccgagaccacccctaagcaagacccctagccggagtcgcccctccgtcccgagactccgcgcccctcaatgcgtcacccttctgagcgcccggcctatctggccccggagcgcagcctgtaacgctctcagccccggaagcctcctgttacgcgccgtgcccccggaggtgcggccgctgggaccagcgccggccctggctccattcgggtcgcccagcccggccaggactggcctcccgcttccagccgctgccggcaccctcagccgtctggcctcccgcggaaaggcgggcgcgaggcatcctgggagtcgcagtcggcggtcgactcacccgccctcacagaggaggtggggacgccatgaagaactacagctcccagggagccgcgcgcggcagttggcggggccgggcttctgccggcggcgggcacgttgctaggagctgccccaacgcctctccgggaagagggcgccaggctcaaaggccctcttgggaactgccgggaagcttaaaagttcctcctgcccacttctgagggctgacacgtggccgacgcggaggcgtgagaaatgtgttgatattgggaggttgacgggtgaatccacaaattcaccggtgtttattccacaccccaaagcttgagggaagtgactgacctgtttaatgatccaatcaaagctgtatagccagaatgaaacccaatactgtcgccccacaaaaagattaagtcacattttttctagtatgtgctaattatgaattttattaaggtttattcaatgtcacagaggaaagaacggtttgtagttttgcttacccgcagtgctggcaggtcacagctgtccaaccatgatccattcacatgctctggccccgtgcccctcgtcctcccacccctaccccacaggacaccattaagccagggctgggtaacaacatatgctcaatgcatcttctcaggtgagaaccaaactcgagccacaacagcaaagggggaaaaaggtagcaaagtaattatgtgctcccaaggcagtcatttagttgaatccataactggaaataaaaaggcatttatgaagtgtagtccgcagtctgaatgtggaaggtggaagatcacacatttactaagaaacactcaaaacatattttggttcagaattctaaaaaatcccgaattttccatgatcttcccaagacaaccaatgacccacttaaatttaaggcaaaaacacccttgaatctaggaatgtgcacatatgcaacagctaacatctggtaactctaataatgttccttatatgtttctgtgtttactatcatgaaccataggaaga[143 bp omitted]aaacccctgtctctactaaaaatacaaaaaaactagacaggcatggtggcaggcgctgtaatcccagcttctcaggaggctgaggcagagaattgcttgaacccgggaggcagaggttgcagtgagccaagatttcgccactgcactctaccctgggtgaaagagcaagacaacgtctcaaaaaaaaaaaaaaaaaaaaaagcaaaaccccaccatcaatattttaaaataaaaagtcgttttagtcaattacagtgtgacttgttctaatcctccaagaatggagtagtaaagaaacagcagaaatgacttccctgcattatttcatgaaaatgatcaaaacctttatctaagtcagaacatcaacaagactcttggtctcaggtcatcagtttcctggcactcctcctctctctagctgtagtagcagctactgcttgaagacaacctatatatcccaggcataccctctacacgtataaaaagatgtgcaggtgttacagaccacctacacctaattcacttcctttctaataagatggatggaataactcggaaaagggaaaggagggattttgagccgcagttgtctaaagaattattgattcacagggatctccaagatcatgcatttgaagagttttatttctccacccaaagccctgcagtgaagaaaatccaagaattaagatgtaacatgttggctgggtgaggtggcttgtggcttatgcctgtaatcccagcactttgggaagtgtggggggagtgggagtgcagatcacctggccaacatggtgaaactccatctctgctcaaaatacaaaaattagccgagcgtgatggcaggtgcctgtaatcccagctactcaggaggctgaggtgggagaatcgctcgaacccgggaggtgaagattgcagtgaagtcgagatcgcaccattgcattcccgcctgggagactccatctcaaaaaaaaaaaaaaaaaaattaacatgttggcccagtgcagtagctcactcctgtaatcccaaccctttgggaggcctgaggtgggagggtcacctgaggctaggagttcatgacgggcccaaggcaacatagccataccctatttccaaaaataaaaaaaaataaaaaattagccaggtgtggtggtgtgcaccagtaatcccagcttctcagaggaggccaaagcaggaggatcacttgagcccaggagttggtggccaaagtgtgctacaatcacaccactgcattccagcctgggtgagagtgagaccctcatggggtggaaaaaaaagatctaacatgttaactttaggaactataaaatgccttcaggtgtatgtgatctgaaattacaagtggtgacttctcagaaagcatatgaacacggtgaatgttgtaatgttctgaagataagctgatacttagtagtgatatgttctaaagacaagaacatgagggccccaaagcctgtgtcatcaactctgctttgaggtcactaatttttaaatacagagcataaagtagaactccaaacacttgggcaagaagaaaatccattgcaaatagccaacacatttctattaaacctcacattttcaattttgtatttggttgagagtactttttaaaaaaaggcttaaatcaatattatctaacacacacaaaaaatctcattaattctcctcactctgggccagatgctgtggctcacacctataatctcagcactttgggaggctgaggcgaaatgatcgcttgagcccaggagtctgagaccagcctgggcaacatggcaaaaccccgtctctacagaaaaaatagaacaaattagctgggcatggtggcacgtgcctgtcgtcccagctactcaggagactgaggagggaggaccatttgaacccgggaggcagaggtcacagtaagccaagatcccaccactgcactccagtctgggtgacagtgataccctgtctcaaaaagataaaaataaaattcctactcagtaattttggagaagacaaggttaaaatgtatctttgtacttgtgaaaatggcttacaaaattttgaatccaacagacccaaacttgtcagtggcagtctagtgtggtagagagaacaaactggacttgccacttcctttaaggtacagccaacaaatgtgtaccaagtacttccaaggactcctaaagtgactggagccactcacaactattggtacaactgcagtaattacagctgatttacagctgtccactcaggcaggtatcactccttccttttttgttcttagtgttccctaaatctaataaacctctattctaaatttcttcataatttaaacctatgtttagttgtgtggcatattttttctctcttaatagtacaaatcagtgacgtttactctatctttattcttgattatattgaataaagttcaagacagaacattccaatattaataaaaatagcatcaaatgtcagatttagattttttttttgagacggagtctcgctcagccacccaggctgcagtgtagtggcaccatcttggctcactgcaacctctacccgccaagttcaagcgattatcctgcctcagcctcccgagtagctgggactacaggcgcgtgctaccaccatgcccagctaatttttgtatttttttcagtagagacggggtttcaccatgttggccaggatggtctcaaactcctgacctcaggtgatccacccgcttcggcctcccaaagtgcttggattacaggcgtgagccaccacgcctggccccagatttagattttaaataaaacgtgaggtactgggtcaaagggggctctgcaggtcgatgatctcctcaaacctgcaaagacatcccatctatgcaactggattggggggtgtcattccaaacaccctcagatcctgcccagatattcatctgtgaacaaggtatttcaacactaattttgaaacaattctacatctagcaggtcagtttatcattttccagaatctgaactactgtcaggatagactcaagtgagattaacacagggttaatcttcaatcttaacacaattatcaattagttctcccagtggaacgattaaggcttttgtcaacatgtagcatttctgctgtaacctataagtctcatattaccagttccccaggatagatagatattatgtcaggtcccaagataggagttatgtttccatggaattaagccatattctcaggactgattctagaacagctggtttcatgaggcatatggcgtagattaaaaaaaaacaaaacaaagtgacttacattgactttaagaaaaaattaattaagatgtatttaacctttaagtatagaatgattgtataaattagatttcaactgaaaggacaattagcgattcagagaaagctcctagaaatagactgaaaacaaagccatacatagagtaagaaatagaacctatggaacttccatttttctaactatagttttttgtttttgttttttcccagttgttaaaaaaaaaacaactcacagtttcaatattttctgaaccaaaaatcagaacacatggtttgtgtcaaagggtttttctgtgctacgtctgggagtgctgacctaagtgacatttttttttaatgccaaatacagtaatctccaagcttttaatggcttatgccaagatgacagaatatgtgaaatctgattgtcccagagttacactctgcactccaaagctacaacagtgccacagctgagaggtttccctatacttcctactactgtgacaatttagcaatccttcaaatggaaaattcctaattacacgagacaatggtcctacagtaggcccgtgcggaataagttccctcgttggaaaaatgctagcatgaatagtttgataaatgcaatccatcagcaaaggagagcaagcaggcagagactgtgccaagcagaaactcattcgcatcaagttttccaataagtttccttcccccagtcccttttcttcaatcctgcttttaagccaggccccagggtaagtctggtagaacactgagcaggaaagcttggaagggttctacaccacttcaaaaatacctttgcttaaaaacacttatatagccagtgattagcaattaaaatgtgaaaataatcaactactcagtagttaaattctgctaattatcaaaagtcatagtctactgggatcagcagcattacaaaaggaagtcatatcgcatttcttaagctttttctgaatggtttaacaggtctctttcagtgttaattgcacttaaaacatctgctttttttcatttaatctctgaaatctgttcattttttccctccatttataaaaaggggtcaatttatcatttgctctatagctatttgaattcgaaaaagattccacaaaatttgagttgcacacaggcgctttctgaagcagattaaacttgtccttgtgacacttcagagcttggactgcagtgacttcaggtgcttgtaagattcgtggacctgtggggaaaggagagagaagaactactaataaagagtttgccatgttaaatagtatactgttttttgtttttgtttttgttttttttttgagactgagtcctgctctgttgctcaggctggagtgcagtggcacaatcttggctcactacagcctctgcctcccagactccagcgatcttcccaccttagcctcccgagttgctagaactacaggtgtgtgccatgacacctggctgctatttgtatttttttgtagagatgggggtttaccatgttggccaggctggtctagaactcctcaattcaagtgatccacccacctcagcctcccaaagtgctaggattacaggcgtgagccactgtgcccagcctgtggttgtttctgaagagtccttatcttttagagctatgcattgaattatttatggataaaattatctgatgtcttagttttttttttttttttgaaacggagcctcgctcttgttgcccaggctggagtgcaatggcatggtctcggctcaccgcaacctccgcctcccaggctcaagcaattctcctgtctcagcctcccaagtagctgggattacaggcatgcgccaccacgcctggctaattttgtatttttagtagaaacaaggtttctccatgttggtcaggctggtctcaaactcccgacctcaggtgatccacctgcctcggcctcccaggtgtgcatcactgagcctggccctgatgtcttagatttatttcaaaatagtccccaggaggagggggatgaaggttcagatgaaacacaactagccacgagttgatagtcattgctgctagacaaagggtgtaccaaagagcactacggaattctctttttgtatattttattctatttgtgtgtgtgtgtgtgtgtgtatactttttttttttttttgagacagagttttgctcttgtcacccaggctggagtgcaatggcacgaacgtggctcactgcaacctccgcctcctgggttctcctgggttcaagctgaggcaggagaattcccgagtagctgggactacagccgtgcaccattactgcctggctgctttttttgtatttttagtagagattgggtttcgccattttagccaggctagtctcgaactcctgacctcaggtgatctgcccactcggcctcccacagtgctgggattacaggtgtgagccaacgcacccggcctgtatatatttttaaatgttcaattcgttatcaaaaattgaaattgattaagaccctggttactgtgggaacaacccagttcccttctgaacctgttgctcaaataaagtgactgtcagaagtggccatggtactttcagagctttcacagataaatccccttcgagaggcctttcctgcttcaatatttaagtgaagacttttaaaaaggtgcagagacactggatttttacctctgctttgttcagtggggagttcttagcccactcaaacaagttttcatacacattcccatcatagcggccaagcacagagccaagtgtcacatcctgaaaatcaaatgcatcaaccaaagcaacagcatctgagcgaatcagagtgagtaactcctttacacgctggtttacttgtgtaatctgaggctctgtcatgatgctcccctaaaagagaccaaaataagtaaataaaacatatatatgtatatagatagacataattatatgcatatacagctataaagcggatgacaattatttttttctttttttttttttgagactgagtttcactcttgttgcccaggctggagtacaatggtgtgatcttggctcaccgcaatctccgcctcccaggttcaagcaattctcctcccttggcctcccaaatagctggaattacaggcatgcgccagcacacctggctaattttgtatttttagtagagatggggtttctccatgttggtcaggctggtctcgaactcccgacctcaggtgatctgcccgccttggccaaagtgttgggattacaggcatgagccactgtgcctggctatttttctttttctttttttttttttttgagacagagtattgctctgtcacccaggctggaatgcagtggtttcatcttggctcactgcaacctctgcctccagggttcaaatgattctcgtgcctcagcctccctagtagctgggattacaggcatgtgccactgcacctggctaatttttgtatttttagtagagacagggtttcaccaggccaggctggtcttgaactcctgacctcaagtgatcaccgtacccgccttgggctcccaaagtgctgggattacaggcatgagccaccgtgcccagccaacaattatttttcttaaaacaacaacaaaaaagacttatacttagaaaatactgacctgaaggaaatcccccgcgttctgactgattccatacagagaatacagcagacataaactccttaagacagcttgaatggctttatcttgaattttgaggagtttttctgaaaagagcttaactaccacatagtggcaatgtgcctaagattaaaaagaaaacaccagagtttgagaaccttggaaaaagattcaatatacagtgactagggtttctgtaccagaaaatgcgggatgctgagggcagggaaggggaaaaagagagaactaccactgacctcacttgctcgaacaaggtcaacagaagttaggttccaagctacctccttgctttttctgtgaatcacttctttttgaaggttttttgcagcaatttctactaatctgttaagacatagattggaggtctgaggaaatgatcaacagtactcatgccttcttgccatctgtcagggccccagccccactgctgcgtattctagctcttgagggagagctcacctggctgcacggagtttatatgcttcggttaggctttcggggctgttgatatccaccatggttggccagactgctacctgctgtggctggatgcgctgactgggcaggtcgttcaaataggacaccatgccacacaccaactttcctgagtgcacctgatcataacttttcatcaggaacctaaaagtcaccagtaaacatgcttttagtaactctactttcttttgtttcttttgagatggagtttcattcttgttgcctaggctggatggagtgcaatggccagatctcagctcactgcaacctcctcctcttgggttcaaatgaatgattctcctgcctcagcctcccaagtagctgggactacaggcacctgccaccattcctggctaatttttaatattttgtttttttagtagagacagggttttaccatgttggccaggctggtctcttaactcctgacctcaagtgatctacccggcttggcgtcccaaagtgctgggattacaggagtaagccaccacacctggcctttttttttttgatggagttttcgctcttgttgcccaggatggagtgcaatagcgcaatcttggctcactgcaacctccgcttcccaggttcaagcgattcttctgcctcagcctcccaagtaggccgggattacaggcaatgtgccatcatgcccggctaatttttttgtatttttttagtagagacacggtttcaccatgttgatcaagctggtcttgaactccttacctcatgatctgcccacctcagcttcccaaagtgctgggattacagtcatgagccactgtgcccagcccagtaactctatccttgatacaactgcaagctatgtaacaggtgcttcatactctctagcctcaccacgaaataaaaaccgtgagtcaggatggaaggcaaaagtatacctttcaggaacaaatatatatatacggtgaagaaaaaccatgggaacaagaacctaggaaaaggactagaacattcttatgaacagatgggaggaatcgaggatttgactctcacctagccgtctggagcatcatgacagtgttttctccctcaaaggtacagcttggggtgaaattgacataaatatttggaagaccactgcaatgagaatagccatgcccaccacaagccatccgacatgcttcaatgccagtgtttgcagtccaggaggtgaaagccttcagtccagcggtgagggcatgaagctgagaggacaagcacagatctgtcaggacatctgtggtgctgagagcccgagaaccaatgagaaaacacacccctcctctaacatcttggccactgtcaaaacacagctgccacacatgcaaactgaagaagcacagctgtccgactggccagaagaatacagaacactacccatgcccatctaagctgttctacttggctaaacattcaccacttacatttccttgattgacaaataatcaacatggtacagtatttctgataacactaaaaatactgaacaacaaaccccacagatcttcatatctgatctactttcaaccagaagaagttctcagaatacatacttcttttcaggaaataccaacatttagttatctctggacctcatccaacaggcaaccacgaaacagaagggtgcccatgagtgaatgagaccaaactcatacctcaggcagttcactcaggtccccttgaccaatgccttcgttaatccggtgataggtctccttcatgtatgcgcccacaaactggaaggcataggcagtggccaggagtggaaagagtttatactgctgggtttgaaaatccaaaatctgtggttctggttcactacgtgacatagaaaaagaaaaaaagtagtaagtaaatgtttatacagaactttctatatgccaggttctaatctaagcacttggtattttaacttatttagtcctcttaagggcactgtgaggtagttactattactatctccattttacaaatgggaaactgagaggttaagaatctgcctgaggtcacacagctcgtatgtggcaggtcttagatttaaattgaggcttttttttttttttttttttttttgtgatggagtctccctctgtcacccaggctttagtgcagtggtgcgatcttggctcactgcaagctccgcctcccaagttcaagcgattctcttgcctcagcctcccacagtggtgggattacaggcatgagccacggtgcctaggctatttggctccctaagaccatgctgtaattaccttgtactgcgtaggctgacagaattttctggctgcaaagtccatatctgtcctagtctttccagtatgactaagaaaaccgtagctcatagcaacatacaaaaccaacgctagtcaacctaataagaaggcaatgccaaaaagctctactcaccagatggctgaatacattgtattttgaccacaatcttggagaagacccaatggatggtgttaaatattttgaagtgtaagaattagcaagggtctcattgtatcaattcctttattcctttttaaaaatgtaattattattattattttttgagatgaagtctctaacacccaggatggagtgcagtgttgtgatttcggctcactacaacctccacttcctgggttcaagtgattctcctgcctcagtctcccgagtagctggaattacaggcacccgccaccacacccagctaatttttgtattttagtagacgtggggtttctccatgttggccaggctggtcttgaactcctgacttcaagtgatccacccgctttggcctcccaaagtgctgagattacaggcgtgagccactgcgcctggccttaaaatttaattaacttttaatttttttgaaaatagaccagcctggccaacatggcgaaattccgtctctactaaaaatacaaaaattagctgggcatggtggcgtgcacctgtaatcccagctactcaggaggctgagacaggagaatcacttgaacccagggtggcagagactgcagcaagctgagatcgcgccactgcactccagtctgggcaacagagtgagaatccatctcaaaaaaaaaaaaaaaagaaaagaaaatagagacagggtctcactatgttgctcaagttggcctcaaactcctaggctcaagtaatcttcttgccttagcctcccaaagtgctgggattacaggtgtcagctaccacacctggccagtttctttattccttaggagtaaaaagagtatcagggagtatcagtgaaaggcagttgtaggaataaactgtggctatgaatgcaaaagggaaacaaatttaatgtcactttcaccatgcacaatttacagttgctagtagtaatcagaactttcaaactgcctttagtgtgttgaacatttcacttataaagttcaagtaatattattactatttttcttaaaaagttaaaaataataaggtgggtattctctttttttcttttttggcagtcactgattatagcaagggtggttatttctgtctttcctcttaagaaaaggaagcctagatatgaaattacaggcccagttatcaccctagccaattttgcagtgctaatgcatcttctgtattgacatttgggaattctgggatctgaatggggtaaaaactaggcctttggtactgagcccatctaggaccctatccttaccctggcttgatttcagactggtgcctcacagcgctgtatcggatggcaatggtgcacgccttagacagagcccgagcagcttctcccacaaggaaggacctgacaaacaccatggtcccgtaagtcagcttgttactcagcggtttcacgtatgtgccatcaggcttcacctggaagaagaacgtggaactgatacttccttcttttaagcccaagaggcagttcagtggttctcaaagtgtggtccctggaatagcagcatcagcatcacctggcaacttgcatgaaatactacatcttagtccccaccctgaccaactgaatcagaaactccagggtagggcctagcaacctgggctttaactggccttccaggtgattctaacgcatgcaaaagtttgagaatcattggtttagcaaatcaaaatatgtccttcaaccctgacaa[136 bp omitted]ggtgaaaccccatctctactaaaaatacaaaaattagctgcgtgtggtggcacgtgcctgtaatcccagctactcaggagctgagacaggagaatcgcttgaacctgggaggcggaggtttcagtgagctgagattgcgccactgcactccagcctgggtgacagagcaagactctgtctcaaaaaaaaaaaaaaaccaaaaaatgctgggtgcggtggctcatgcctgtaatcctagcactttgggaggccgaggcaagagggtcccctgaggtcaggagtttgagaccagcctggccaacagggtgaaaccccacctctactaaaaatacaaaacaattagctgggtgtggtggcgcatgcctgtaatcccagctacttgggaggctgaggcaggagaatcgcttgaacccaggaggcggaggttgcagtgagccaagatcacgccactgcactccagcatgggtgacagagactctctctc[137 bp omitted]ctgcctcctgggttcaagcgattctcctgcctcagcctcctgagtagctgagattacaggcgtgtgccatcacacccggctaatctttgtatttttagtagagacaggttttcaccatattggtcaggctggtcttgaattcctgaccttatgatccatcctccttggcctcccaaagtgctgggactacaggcatgagccaccgcgcccagccttattccctccttttatgagacggagtctcactctgttgccaagctggagtgcagtgtcatgatctctgctcactgcaacctccgcctcccgggttcaagctattctcctgcctcagcctcctgagtagctgggactacaggtgcgcaccaccacgcccagctaattttttggtatttttagtagagatggggtttcaccatgttggccaggatggtctccatctcttgacctcatgatcttcccgcctcagcctcccaaaagtgctggaattacaggtgtgagccactgcgcccagcctcctttttttttttgagacaaggtctcactgtcatctaggctggagtacggtggcataatcacagctcactgtagcctcggcctcccaggctcaagtgatcctcccaccccagtctcccaagtagctgggactacacacgtgtgccaccatacccagctagatttttttactttttgtagagatgggttctcactatgttgcccagactgatcttgagctcctgggctcaagtcatccacgcactcagcctcccaaagtgctgggataacaggaatatgccagtgtgccctgctgttattaccttctaaaagaacagaccattctaaccctattgtgagtaacagccactcaactccactgtttgatgcctctgctttattttctatcaaaacatacctgggcatacttcatcagcatgttttctctgggaatacgatggttgtccattttgaggtagccattgtctatctcatcataaccaaatttggggccgatgtcaccaacggtaattcctaccacagatgaaaggacagtcacgagatgtttatgctctggaatttctggcttttgctccgcctcttcagttgggcattctaccttttgcagaagaaagtgctcagtttcattttcatctcaacatcagatgaacagttcttacctggcaaaggcttatgggtcccgatttcacgaataggtacgataaaggcatgtaatccatagcatttccccttagtgatgagctgggcaagaactattgcatgatttgaagtctttccaactgtaatatcaaagagaacaagggaggggtgggcaaacgttcatacatttttaaagggtagaaaaaagaagaaagaatatgttaaatctaacactagactaaaccaatagtatgtgtccagaaagcctttctgctgacagcatcacacctagctttcagaaagaaattcccttaagctaatagttattactttcttttctacttatttctcatacatttacgtagagaaaattttaggataaaaataagaatattaatttaaactacttccttgttatcccttaaggcagtgctgtccaaaacagtaatcactagctacatgtggcttcttacatataaattataaataaataaaatatataatgtgaataacaaaatccttcaaccactaactgtattggaaatatatattccaagataataactcagaatggaataagaagatataaaagtttcgggtcagccgggcacggtggctcgcgcctgtaattccagcactttgggaggccgaggcgggcagaccagaggtcaggagtttgagaccagcctggccaacatgatgaaatcccatctctactaaaaatacaaaaattagttgggtgtggtggcacgctcctgtagtcccagctactcaggaggctgaggcaggagaatcgcttgaacccagaaggtggaggttgcagtgagcggagatcacaccactgtactccaacctgggtgacacagtgagactccatctcaaaaaaaaaaaaaagtttgtgttaaaactatttaaatttttttcttttttttttttaagagacagggtttcactctgtcacccaggctggagtgcagtggcatgatcacagatagtagctcactgcaggcttgaactcttgggctcaagtggtcctcccacctcagcctcctgagtagccaggactataggtctataggtatgtgccgctatgcctggctttcctctctctctctctctctctctctctctctctctctctctctctctctctctctctctctctatatatatatatatatatatatatatatatatatatacacacacacacctctctctgtctatatacacacacacacacccctctatgtacacacaccacacacacatatatttgtttgttgggttgtttttgagacaaagtcttgctgtgatgcccaggctggagtgcaatggtgcaatcttggctcattgcaaccttcccgggttcaagtgattctcctgcctcagcctcccaagtagctgggactacaggtgtgcgccaccacacccggctaatttttgtatttttagtagagatggggtttcagcatattaaccaggctggtcttgaattcctgacctcaagtgatctgcccacctcagcctcccaaagtgttaggatttcaccaccaagtctggccgacattatcataaaagctctacattctaagcaaaatctcatgacaaaccttcaaaacatccaataaatgctgaaaaattcacttacgcccaccaggccaccatttaatggaggtcacagtaggactgttgagaatgaactcctgggtttcagggtcatacgtggctgtggtttccaagcctcgaaggtgagttcctaaggagataaattacattgacttcagttaagagatggggaaaaaaataggcacaaggaaaaatttcctgcacagtcctttaaactctcatatctcagagaaaaacaaaatctaacaaaaaacacctgtagatgagctacaactggttgataaccaagacactgaatttcccacactatctgatggtttcctattaagttgaaaatctaagtgtcatgcatgttccatttctgtatttgatttgttacatttatttacagcaactgaaagaaaatataaaggcaacttagaatcacatttttaagatcacaatatatgaatttaacagggatgttaactgtctttttaaacccatctctgagttgcaagtatgccaatttcaagtcatatgtattgtgttaaccacaccaattcaacattcttgaattctgtactaatgagaagaatgagataacatgtgagaggaagacatttcagccaaaattcgtataaatta[140 bp omitted]ttagccaggcattgtggcatgcgcctgtagtcccagctactaaggaggctgaggcaggagaattgcttgaacccgggaggtggaggttgcagtgagccaagattgtgccaccgcactccagcctgggtggcagagcaagactccatctcaaaa[488 bp omitted]tattggggaaatgacctgaaatgtgacttttaaaaattcctaaaggtccaataataaggtctcagttgaccctagagatttccaatggcaggcctaacttagtcctgctggttcattaatgtggcaaggaagagtttccagtttcttatgtgtactgggatagacaggatcttatgttttaaatcttaacacaaatatatcaaaattatttgaaaagagtcatagaaaaatgttctaggtggcagtctctacaaaaatactgtactaaagcaaacgttgggaaccttttaccaatctgctttcataacgcttagacctcattaaacacactttgaaacatttagaagcttccaagttgaataaccaacttatgtgcaatccacaactttcccgagtgggagtcaacaaatcagacacagacatctttcatcaaagaagcagcttttacagaaaagcagataacattaaacagaacagataaggacaaaatgttttcaaaagcacaactgaaacaaatagtattccacttggagtctcatgaaaatcctgtaaaatactattcaacaccaaataaaaagcagcagctgtatagaaataaggagcaagtggcaaatacacactagaccagtttttctgaaacgtcagagcagaaaaagagaagccataagcaaatgaatggcaaacacggacccaattcagagaagatacaaagaggaacagcggccacctccagcccacccaggtgcatgaagaaagcaggtggggggtggaaagatcaatgaaaggtggagatacagagtctgaaaccaaatgcctgcaagttcggcttatcttggttttttcactctccagccaagtcacttgcagaactactgattgactcaaagtacaaataactccaaaatgtcacacacgtcagttataagctactcatttccctcaagcaaatccaagagtacacaaactattatttgtatttcttctggaatttgtactcattaaggtatcagtagtaaaggtaatcagatagtaatgaagaaaaaaacagcttcgggttgtatatgcacacagattctatacaacctcagtaacattgaaaaaccacttggtaaataaggcctgatttgcaattcttgaccctctgaaggggaactatggtataaaaaggacaatcattttatcagtatcatggtctttaattcccactcaccaaagcagtgtttataccaaaacctggactctgcagaaagagctcatttaaacagaccatagaacatcgacacaccatcgatggcacatggtgggcactccacacatggtaagctcacaggggcccgcccaacccagaaggtagactgaatactccataccatgacccatctctgtctgggcataagtgccaatgatctccaagttccaggcgggcatgaagaagcgctcctgctgctccgcagttgcctggtgaagcaaggtgggcaggaacatgcccaagtgaagatccagaggctcaggccgccctcggtgcacaaaacttcgaggaaatatcaaggatgggcatttgagagaagagtcatcaggtgtgagagaatcagcaatttaaatagagcaagggaaggagacaaaaaaaccttaagtatgaattagttgcgtgcacttaatcatagatgggagcactgtccctttctgtattactttatagctcttgttaatttccatttttcctgagtcggcaaggagtacgaggacagggattggttactgattccaaagccaatgcagcacaaaaccacacgtgcaaggcagaggatcctcgcccaggaattaaatcaaaggaaataaagaaaatttgagaggccagtgcagtggatcatgcctacaatctcagcactttgggaggccaaggcggtcagatcaccttaagtcaggagttcgagaccagcctggccaacatggcaaagccctgactctactaaaaatacaaaaatcagctgaacgtggtggcgccagccagtagtcccagctatttgggagcctgaggcaggaaaatcgcttgaacctaggaggcggaggttgcagtgagccgagatcatgcccactgcattccagcctgggtgacagagtgagactctgtctcaaaaaaaataaataaataaataagagagaattggccaggtgcagtggctcccacctataatctcagcactctgagaggccgaggtgggtggatcacctgaggtcaggagttcaagaccagcctggccaacatggcgaaaccctgtctctactaaaaatacaaaaattaagcaggcatggtggtgcacacctgtaatcccagctactcaggaggctgaggcaggagaattgctccaacccaggaggcagaggttgcagtgagctaagataacaccactgcattctagcctgggcgacacagtgagactccatctcaaaaaaaaaaaaaaaaagagagagagaatttgaaaagttgtatagggccaggcatggtggctcatgcctgtaatcctagcactttgggaggctgacgcaggcggatcacttgaggtcaggagtttgagaccagcctggccaacatagtgaaatcccgtttctactaaaaatacaaaaaaaaaaaaaaaaaaaaaaggccgggcaccgtggctcatgcctgtaatcccagcactttgagaggccaaggtgggcggatcacctgaggtcaggagttcaagaccagcctgaccaacatggtgagaccccatctctactaaatatacaaaatcagccaggtgtggtggcacatgcctgtaatccaagctacttgggagactgaggcaggagaacctgggag[143 bp omitted]ccagctacttgggatgctgaggcagaatcgcttgaagccaggagtcggagaacagagaatttgagtggtactggtacaaggatttcctctgatgagaaagcgagacagaacatagtagttctctcagagtgacagtatgacccccagattatagtttttcctcgatgcaatttcaataatgcttctaggctgggattttttttctgttttgtccacaaaacatccagcgtagaaccatattcctcacatagctctgatcatttcattcagattcatcatgtcaaatattcggccacgctctactgaaacactttaatacaaaaactgacagtgctcttcatcccaataatttatttcagaaattaaaaaagacatgcaatttctagtgaagaccataataacgacaagttacagattcatgcataagctctccgtgacaattatacagaaattatcattaatgataataaacagctttattagttttaaatcaactttctggggtcattcttttccacttaaaacgtgcaggggacaggattctgtgtgaatttttgctagggataggaagtcgttctataggcctttgcatttttccacattactggtattctgtgtaattgccagctccaaatccgtcaactccatattgctcttatcattctatgtgtctttgaaatgagcataaatgacagttcagtttttaaattgctgtttgttccttgcaaggtagggaggaaaagaaccagggcacactgctcagacaagtgctaatcaatgacttcttccaatctagtggctaggctttcagctaagcaatcacactttagaaaaagaaaaatcaaagtatgtgtgactgaatccctcattttacagaggagaaattaaggctgagatgaattaaatgccttgctcagggaaaaaagaaaatggcaaaacaaggacaagaatctcgtcaccatgggagctgagcaa[145 bp omitted]aaaccccatctctactaaaaatacaaaaactagctgggcgtggtggtgggtacctgtaatcccagctacttgggaggctgaggcaggagaatcacttgaacccaggaggcaaaggttgcagtgagccacgatggcaccactgcactccagcctgggcgacagagactctgtctcgaaaaacaaaaaacaacaacgaacaaaacagacactggaggctccagaatgtggaaggatgggaggggtatgaggcctgaaaagttacctactgggtactatgttcactatttgggcaatgggtactgcaaaatcccagacttcaccattacataatatatacatgtaaggaaatggcacttgtaccccctaaacctattttttaaaaaaagaaccaccttgtcacctcgtcctgtctcctagctggggaaattactgcacaagcatagcatggactaaagactgtgactgcaggccgggcgcggtggctcacacctgtaatcccagcactttgggaggccaaggtgggcggatcatgagatcaggagatcgagaccatcctggccaacaaggtgaaacccctctctactaaaaatacaaaaattagccaggtgtggcagcgccagcctctaatcccagctactcgggaggctggggtagaagaatccttgaacccgggaggcggaggctgcagtgaacggagatcgtgccactgaactccagcctggcaacagagcaagactctatctaaaaaaaaaaaaagactgtgactgtaatgaagatgctaaaaagacatgctgaaaaagccagggctgtccttagaagcctcaaaaatggaaatcccacaaggtgtcaccactggtagagactccgtgacgggttcacagggtttcctggtactatttttgtaacttcctatgactctacaatcatttcaaaattaaaaaaaaaaaaaggccaggcacggtggctcatgcctataatcccagtactttggggggccaaggtgggcggatcacttgaggtcaggagttcgagaccagcctgggcaacatggtgaaaccccatctctactaaaaatacaaaaattagctgggcatggtggcaggcgctggttatcccagctactcaggagggtgaggcacgagaattgcttgaacctgggaggcagaggttgcagtgagccaagatcgcaccactgcattctagcctgggggacaagactccatctcaaaaaaaaaaaaaaaaaaaaattaatagcggaaatcccaagaaaaacacattcatgggatgagagtgcctttcactcaaacagaaatgtcaactgtccccagccttttgagtactgtctaggaagaaaattcaatgtgcacttagaacctggaaggtgaaaactgagttaggactgaaacctgggaccagacacttttcatgcttttatggaaggttattttacttcactagaaatcagagcaattcctggtgaaggaaaggccactatcaagcacccatcagcctctggaagatttacatctgagtgtaccacagagtgaagatgcacgctaagggttacaacaaatgcgctcagtagggcaggggtaaaaccactataatcacaaatggttctgacactaaagaatgttttcaggaaaaaaatatttcttccaaataagacaaggattattcagatgtggatgaaatttagaaatgttacaaggagaaagtgaactgcatagttttttgacttaagccaagtatttgttttaaaagctgcttatgcatgataaagatattatttttaaataatttatcgtaaaattacgaagcaccaacattatacttagtgaagggctagagtcagctcttttaaaaccaaaacatcaaaaggcatccccagcctctctttccacatgatacaaggctggaaaggctgacaatcaatactgaggaaaaaccaattagactaatcatatatgagaaaggaagaaataaaaagcagctctgtagaaagcatgagtatcatcctaggaaatcaataatgtcaacaaaataccacaataagtgaattgagaaaagctgcaggctataagggaaaaaaaattaacagcactcaggcgtggtggctcacacctgttaataccagcactttgagaggccgaggagggcgcatcacgaggtcaggagattgagaccatcctggctaacacggcgaaaccccatctctactaaaaatacaagaaaattagccgggtgtggtggcgggcgcctgtagtcccagctactcgggaggctgaggcag[160 bp omitted]acaggaaagaaatagcttcccaagaaaagacaaggcttcaatataaaactaacttaaaattccagatagagaaggagaaaaacacatttaattcctgtagaatttttttttagaacctgacagattcagatcagaattcatctagaataagcaagcttaaataccaaatacacgtatcttgaaatgtaacaacagtaggcttatcctatcagatttttaaataccttacaagcctgggcaacacagcaagatcctatctctactaaaaatttaaaaaatcaactgggcgcggtgtcacgagcccatactctcaactactcgggagactgaggcaggaggatcccttcagtctaggagatcaaggctgcagtgagctatgatcaaacctctgcactccagcctgggcagcagagcaagaacccgtctttcaaaaataaaaatatgccaggcccagtggctcactcctgtaatcccagcacttcgggaggctgaggcaggcagatcacctgaggtcaagagttcgagaccagcctggccaacatggtgaaaccccatctctactaaaaatacaaaaattagatgggcatggtagcacatgcctgtaatcccagctactcgggaggctaaggcagaagaattgcttgaacctgggaggcagaggttgcagggagctgagatcatgccactgcactccaggctgggtgacagagcaagactccatctcgaaaaagaaaaaaaataataaataaaaataataaaataaaaaataaaggccaggtgcggtggctcgtgcctgtaatcccagcactttgggaggctgaggtgggtggatcacggggtcaggagtttgagaccagcctgaccaacatggtgaaactccgtttctactaaaaatataaacattagctgagcatggtggtgcacgcctgtaatcccagctactcagggggctgaggcaggagaatcgcttgaacccgggaggcggaggttgcaggcagctgaaatcacaccattgcactccagcctgggcaacagagcaagactccgtcttaaaaataaataaaaaattaaaataaaaaaataaaaaataaaaataaaaatagagtaaaaagtcttggctgggcacggtggctcacgcctgtaatcccagcattctgggaggccgaggtgggtgaatcacgaggtcaggagtttgagaccagcctggccaacatggtgaaacctcgtctctactaaaaatacaaaaaattagctgggcgtggtggcaggcacctgtaattccagctactggggaggctgaggtagaatcgcttgaatccaggaggcagaggttgcagtgagccatgactgcgccactgcactccagcccaggtgacagtgcgagattctgtctcaaaaaaattttataaagcaccagtggtcaaaatttatgttagaagaaaaacaaagaaagaaataaacctatcaatgtaatatatttaaggttccagaaataaatttaacctattataaaactctaagacaaaccagaaaggacataatgggaataagataataatgggaaaaagccactagttaacaatgaacattagaaatctcggaagctgcgccactgcaccccagcctgggtgacagagtgagactcttgtctctcaaaaaaaagaaaaaagaagtacaaaaaaaaaaaatctagaaaaccatgagattcattctcactctgtatcatatacaagtcaaatcattaaacagaaaccaaacaaaaatattagaagaaaacagaagaggccgggcgtggtggctcacgcctgtaatcctagcactttgggagaccgaggcgggtggatcacaaggtcaggagatcgagaccatcctgaccaacatggtgaaaccccatctctactaaaaatacaaaaattagctgggtgtggtggtgggcacctgtgatcccagctactcgggaggctgagccaggagaatggctttgaacccaggaggcagaggttacagtgagccaagatgatgccactgcactccagcctggtgacagaggaagactatgtctcaaaaaaaaaaacccagaagaaaactatccaagttatggaaaagataaaatttatacctatgcagagaaggatgtgttaaatatataaagcaaaaacgtttagcaaagcagaaaataatttaaaaaatcgaaatatatatatatatacatacatatatatatacatacatatatatacgtatatatatacatacatatatatacatatatatacgtatatatatacatacatatatatacatatatatatacacatatatatatatacacgtatatatatatatattttttgagacagcatgtcactctgtcacccaggctggagtgcagtggcacgatctcggctcactgcaacctccacctcccaggttcaagcgattctcctgcttcagccttccgagtagctagaattacaggtgccgccaccactcccagctaatttttagatttttagtacagacaggtttcacc[131 bp omitted]aacagtaaatcaaaacacgtaataacatccaggcttactagtaatg[221 bp omitted]gaggc[138 bp omitted]ccagtagtaccagctactcagggggctgaggcaggagaatagcgtgaacccaggaggcggagcttgcagcgagcggagatcatgccactgcactccagcctgggcgacaaagcgagactccgcctgaaaaaaaaaaaaaaaaaaagaaatatattaaagtaggccatgtgcagtggctcatgcctgtaatcccagcactttgggaggctgaagcgggcggatcacctgaggtcaggagttcaagaccagcctgaccaacatggagaaaccccgtctctactaaaaatacaaaagtagccgggcgtggtggcgcatgcctgtaatcccagctactcaggaggccgagggaggagaatcgcttgaatgcgggaggcggaagttgcggtgagccgagatcacgccactgcactccagcctgagcaacaagagcaaaactccgtctcaaaaaaaaaaaaaaagaaatatgttaaagtagcaaaataaattaaagtgaccacgttgatggagctgtggaaatacaggtacagagcttgctcaatatattgtcaactggttctgtgtttcaggaaaagcctcaaactatgcagcaaaagctctaaaatgctcatgtccctcaatatagtaattcatttctgagaggtattccagaagtatgaccccaaagaatacagcgtcttatttatttatttatttatttattttttgagacggagtctcactgttgttacccaggctagagcgcaatggcgcaatctcagctcaccacaacttccacctcccaggttcaaaagcttctcctgcctcagcctccctagtagctgggattacaggcacgcaccatcacacccaggtaattttgtatttttagtacggacggggtttctccat[139 bp omitted]ttggtgaaatttagcccaaatccccagggaagcaagtctcatgagaagtccaacagggaagagaatcacttgggcagagggaagaggagactgttaagcctagggagagagggcaacggagtgcggtaaagactgatgacttaaaaatcaagtttactacctctttccagtttcaaagaaaggtgcattatttcatatttaagtgttaatgatggcaatttgccaggatactgcatcagcttcaaggataactatgtatcatacaatctctatattcctaaatagatggtaatacgaaacaaggcaatgtgaccccagtccatgggtgaggaataaagaaagaaaggaacgaaaggaatggaggaagggaagaagacagaaagagagcgagaaagaggccgggtgcagtggcttacacttctaatcccagcactttgggaggccgaggtgggcagatcgcctgaggtcaggagttcaagaccagcctggccaacatggtgaaaccctgtctctactaaaaatataaatattagccaggtatggtggtgcacacctgtgatcccagctactcaggaggctgaggcaggagaatcacttcaaccagggggaggtggaggttgcagtgagccgagattgtaccattgcaccactccagcttgggcaacatgagactccttcaaaaaaaaaaaaaaaaagaggaaggaaggaaggaagtgagcaagcaagcaaacaaggaaaacaaagcaagaagaatctccagaaatggccacatcttgaaatgattacatatctgtgaagagcaaacaaacgacctgttttgtggcctaaagaaacatatggtcaggatgataacatggacccagttccccaggctgttcctttgatcccagaactccagggaggtgagcctatcacccaggttcaggcctctgcctttgattatggctcccagacccacagggcaggtgtatatccgagtttcttcgtgtccttagaggaaagaagacacactctagaaagaaggataatgctggtgactgagactttctgtaggtgactgaattttaggatttggaaggaacatggagtgaacctgaatacttctgagccccttcacttctcagcagctacccagaagtgaaagaatcccaaacccaaagttacagctacttctgtgagaccgcgttagataatcactgttcactgttgatccattttccaaagtctcagaatttaaatagttagatctcattctatataagctgctctattgccgatctcctggacgttgactttttgtgtattccatataagataaaaccgtcacgtgatgcaaattaaccaacctgacttatttccaaggaaaagatcagtcatcaaccaagaacagcaatatgaattagcaaaattccagcaagaaaaaagactaatcttaggacactgttctctaaaccacagagattaagacaacgttggtt[131 bp omitted]accccgtctctactgaaaatacaaaattagccgggcatggtggcacacgcctctaatcccagctactagggagggagaggcaggagaatcacttgaacctgggaggcggaggttgcggggagccgagatcgcgccattgcactccagcctgggcaacaagagcaaaactctgtctcaaaaaaaaaaaaaaaaatacccaaaactaaaagcaataagggaacgaaaactctaacaaatgcaaacttgcccacagccatataggatctctgtccaacttctgtttgcctcaaaccagtatagttcaagtcttcctttcttcctctctcctttcaaaaattagggcaggccgggcgtggtgactcacacctgtaatcccagcactttgggaggctgagacaggtggatcacctgaggtaaggagtttgagaccagcctggccaaaatggccaaaccccatctctactaaaaataacaaaattagccgggcatggtggcaggtgcctgtaatcccagctactcaggaggctgaggcaggagaatcccttgaacccaggaggtggaggttgcagtgagctgagatcactccactgcacttcagcctggggcacaggatgagactctgactcaaaaaaaaaaaaaaaaattagggcaaatatatatttgtgatattactttataaatgaggcagaagcattagaccaacaagaggtaagaggtatacttaacaaatccattagcctcagactatttcacatcttatgcctcctatgaacagcatgactgttaagtcgaataaattctataatgatgaatactgaaacagagttctgtaccacaaagctacttcaaaattacaacacacacacacaccacgcatgcatgtacacaaacacacagatactccaagcgaggaggactacataaagaatcttatctctcaggccgggtgcagtggctcatgccttgtaatcccaggactttgggagggcagatcacgaggtcaggagatcaagaccatcctggcttacacggtgaaaccccgtctctactaaaatacaaaaaattagccgggcgtggtggcgggcacctgtagtcccagctactgaggagctgaggcaggagaatggcgtgaacccaggaggcggagcttgcaccgagccgagatggcacaactgcactccagcctgggcgacagagtgagactctgtctccaaaaaaaaaaaaaaaaaggaaggatctgtcagccaggcgcggtggctcacgcctgtagcctgtaatcccagcactttgggaagccaaggtggacagatcacctgaggtcaggagttaaagaccagcctggccaacatggagaaaccacgtctctactaaaaatacaaaatcagccgggcgtggtggtgagcacctgtaattccagctactcgggaggctcgggcaggagagtcacttgaacccagaggcggaggttgcagtgagctgagatcatgccattgcactccagcctgggcaaaaaaagcaaaactctgtctcaaaaaaaaaaaaaaaaaaaagaatcttatcttcctttacaaacctttctttcaggcttataatttcagtactgaccatcttgaagttgaagtcttgagtgtttagtaaagtgtctggaacatcaaaccatgaccagaaagctgcagtacccatggagatgacaataaataacattttccttaaaccaattcacacactgaaatcagcaatcaaacacaaaatgatgtttccctgatatctgcatccctttttctttccctttctttactcctgccattttgataattagacatgaggctgggcagttcaaattccaaacactcaaacctgccaatggccttgtctatgaaaacaaacctatttcacattaagatcaaaagcaaaactttttgaaggaagccagatatttaggaacaatttaacaaagaattactggcaacacaagagttcccagacatgtaggggaaaaaatgtctaaaaagactgaagtcagatgaagagaatcatggacttttttccaaactgccttataaccctgctagtgggcaatgagatgagacaggtagctgccactgcctgctgcccccattaaaatccacagctttaactgcattagagcagagaggcgctttccagatattgctgaggcactaaccctctgaagaatttccaacaaagtctttactcattagacccagagtaacataatggggttccccgctgcactgtaaaccccatcttttcaagctgttcaataataaaaggctttaggaaataacagtgaatgacgtttataggccagagccctggaccagtttccagggaaaatgtctaggagaaaacaagaagttgaattttgacttaacaacttaaaaatagaatcccaaacaggtagcagcagaaaaaagtcaaatgccagcaatcactgttaactgatgtcctgaggtgggttacccacagaccctcaatgtggactaaccgtggcccatttccgtctgggcgtaggtgccaattatctggagtcctttggatgaaagcagccatttctctttctgagcagtggtgccctgattcagcaaggtaggaataaacatggagtaattgaggcccacaggttccacaaaattgaccaaatgtagtctacaggagagaagagaaaaggatctcagccttcctttagaaactgcatcctacaaccccttcttgccaaacagctttggccttcaaggagaaggtcaggaaaatgtaaacccccttcttatgaaattaaatataagatttaccattttactacctaaaaagccagcagcagaacctgatgatctctcttcttctaattatttcaaggccacagttcccacagttcatttcgtatttacatttaatccactaagcaaattctacctaagttttagcataaaaacttctctaatttttggaaggggaggttgttggtgttatttgctggtttgattggttgaattttttagaatgtgtgtggttttttttttttgctttatttaggttttacctgtttgtttcaaagagcaaaaataactccatagaacacttatttatagcgctgttaacaagagctccaaggaagaaataatttcaactatgtttccctagataatataagcaaatatccaaaagagtaaatacatattccagggcagaatcatacatcgctaaaggtcttcagggtttacaataagtaatgtgggcatgtaaaaatttatccccaatggtcaatgaacattactacggattaactctacatcacattgaaatttagtcctcaactctcttcttacaaaacagaatccacagtagttggccttggctgtgctgtgtcatagattttatagggatcaattttgtactttgacaaagctcgtatctaaaaagtttaaagtacaaaatacatctcatctaactgatcttcacgacttctcaacacatgattaggaagcaatgttactaccagtttatcctaacctgtgcaatgagcagagcatgaactaaaggacagaagggataggctgccattgcagtgctgggggaccctgaaaccaaactaccaccttaaaagaaataatag[138 bp omitted]tacaaaaaaaaaattagccgggtgtggtggtgggctcctgtagtcccagctactcaggaggctgaggcgg[142 bp omitted]cacaatatacccttatttttctatttcctaaataagtactacacggttatccccgccatttctttttttttcttttttggagacagtctccctctgttgcccaggctggagtacagtggtgtgatcccagctcacggcaacctctgcctcctaggttcaagtgattctcatgcctcagcctcccaagtagctgggattataggcgtgtgccaccaagcccggttaattttgtattttagtagagaaggcgttttgccatgttggcc[133 bp omitted]agaaacaaaaaactctcaacatggatgctcttagatacgaatatttctaattaatcaaaatgaattaatgtaatcattatagattccaccagagggaacgacttctgcgtcctaatcatgtgtttagaagctgctcattaacatcagttaaaaatgttttctcagccaggcgcagtggcttatgcctgtaatcccagcattttgggaggaaggggcgggtggatcacaaggccaggagttcgagaccagcctggccaacatggtgaaaccccatttctactaaaaatacaaaagttagctgggtgaggtggcagatgcctcttcacctgctgataatggaaataaatggaaatgcagagagagagagagagagagaaagaaagagagagaaagaaaaagaaagaggaagagaaagagaaagaaaaagaaaggaaaagaaagaaaagaaaagaaagaaagaaagaaaagaaaagaaagaaaggtgatgtatttcacaattaatagcatgtcacggttaactggcagcattctttctttcttagtggtacacaaaacactggtgtgagttataatcgatgagattatataaccgaggctttaactcgatagcatgcgataatttccaggactcatttacaaaccccttctcttacttaaaaactgatctccttgtcatatcctaaggacattggaagtgtgtcaaagggtgtgttaaagtttgtactttaatacttcacatgaaaaatgatacacaaaacaacttcccggtgtccatgaatctttaacccgcataaaagactttgttctatttcattgtgacctcactcgagtctggttcacattatcaacaggtcacaggttatgaaatcatctctatcagctttgaaatgcactgcaccacccattcaaacacacacacacacactcaacccacttttttcctgacgtttcaagaaggaataaaatcttactaattttttcaaatttacaaacacaacacaggtatcagtaacataatcttctaggaggagttactctatctcaatatccccacagccatgagttacaaacttcaaaaacaaaacagaccatttggaagtatgctgatttgaactaccaaaaataaataaacaaaattttttcgtttaaaactgagtggagctctgaggaaagtccaaagtgccagagtaaaccatttcatcttcacaaaaataacccaagtcaagctgaaaatcgataccaaaggcactagaggcagtgaccattattaccataaaggcagaacgtgcaacatgttctatttagcttggttctagtctatacaccactcatacgatttagtctttaccgatgaaaatactggagttcctttaaaatggagaaacctaaaagagaaaatgcccaggaataaatgagaaaaaaatgctataggccaaaataatc[137 bp omitted]cctttgcctcccaggttcaagggattctcctgcctcagcctcctgaatagctgggaccccagaagcgcaccaccaggcccggctaatttttgtatttttagtagagagagtttcaccattttggccaggctggtctcgagctcctggcctcaagtgatccacctgccttggcttcccaaagtgctgagattacaggcatgagccactgtgcccggcccgaagtccttatttttatttatttttaccgttccttgtggagcagggtggatcacgaggtgaggagtttgagaccagcctggcaacatggcgaaaccccatctctactaaaaatacaaaaattagccgggtgtggtggcgggcgcctgtaatcccagctactcaggaggctgaagcaggagaatcgcttgaatccgggaggtggaggctggagtgagccgagatcgtgccactgcactgcagcctgggcgacagagcgagactccgtctcaaaaaacaaaaacaaaaacaaaaaacacaacaaaacacatggtctgaaaaaaggatatactctcttccacactagaaccaaggcaggtttttatgacgtctctctcatatgcacaagacaaccattcaagcactgtcatggattcagaactactgggttcttagactttctattcattcagaggcgtcacagatcattcttcatccaggtccacactaccatataatataatctgctattgctccaaaatatttaaatggtcgtgcaactaaaaaaaaaaatgctcccagattcagaattttagcagtcctccttacaaagagcaaaatgattctgcatttaaatcagtcaaatttgagttgcttgggcagaacaatgcttttacaacatccttgaaactgtactcttgagaacaaaaactcctgcatttccatttattatcagcattctacaaacacgtcatcccacgaaaaggcttggatacaaaagtgatcacattatttttcacacatataactttatttatttatttatttatttattttttgagatggagtctcgcactcttgcccaggctggagtgcagtggcgcgatctcggctcactgcaagctccgcctccctagttcacgctattctcctgcctcagcctcccgagtagctggaactacaggcgcccgccaccacgcccggctaatttttgtattttcagtagagatggg[148 bp omitted]gcatcttcaaacaccaagcacggtgatgaaaggccaccatagaccgcagctgtaaagtttaggcttaacaacacttgctctgttctaaggcatacctactttttaaaccacataatttcatcagggtcagcgatgccaaactccctcatcttcttcaccatgatggcacttttcctgacagccacctcataacgctggctgcgagtgaggaagttcaagtcctcatgctggaagtctgggtcgttcaggatcatgttctctgaaagggggttaaagggcattaaaaggcagacagacactcgggcctccgttccaccctccctgaatcacaataggcttcagagtcgcggacacacctggggaatggcgatatccccccaccagggacacaggctgttcctcgaagtgggggtcccggctcccctaacgctgggccagagggcctaggccccacagcgcccctgactccgcatcgagggagtctccagcttttctcgggaaaggagggaggtctcgcccgccgccctcaccgatctctcggcggcgccgggttttctcggggctgccgtccaggatgtgtgtaagcagctccgggttgaagctggcggaatcccgctccctgcgcaggtccgggttcatggcgacgaccagctggcagcgaagtaagcaccgaccgaggtggcagtgacaatctaaatccgcagctccagcgccggccggaccctaggaggcagcctcaggacggcgcaagtccccgcctccgctcgcccggcccgccccggcccgccccttctttctccgtggccctttggcgcgtgagtgacagcggcccagacagagggggcgatgtccgcgtcgtggctggggccggtcgcggggcagactaatcccctgctcctggccaggggaggctcccgagcggatcctcgggaaaggggctccgaaggtcaagaaactgccctgctgggcgtccggggagtgggaaaataaagcactttttgtatcccgcccctcccccgtcacgtgaccacgcgaggcggaaagaagaaatccgaggaccggcgacgcctagaacaggttggctggggccttgggaagggggcgggacaacgaggctgaggagggattgcgcctgcacttgcccccctcttaccccgcggcctctgtcacgcttccgggtccgtgcccctaggcctctccgaaatgagagtggtcgggagactctggagtctggggcgggagatggggctttgcggaattgctagggagggtcacttgggcttttgccaaatccacccggattggagaagaatgggacgggaaccagtctctttggggagaggctccagttaccttttgttaagataatggcgtctttactggcagaggcgtgggttccggggccctgggtgtgggattgtgagcgctgttcaaggggtggacggggacttagaatgagaccaagcgggcggtgctgctctaagccttctgtctgggaaaccagacattttcccccgcaacctggcagttactagaggtcttggaatccagacttctttgctttcgccatcaccgtcatcaaagtgggaaatgcacacttactgttaaaacctagtgtagggccgggcgcggtggctcacgcctggaatcccagcactttgggaggacgaggcgggcgtatcacttgagcccaggagttcaagaccagcctgggcaacatggcaaaaccccatccctacaaaaaataccaaaaaattagctgggtgtagtggcatgcgcctgtagtcccagctactctgaaggctgagatgggatggtggcttgagccccggaggtggaggttgcggtgagccaagattgtgacattgcactccatcctgggcaacatagtgagaccctgtctctacagaaaaaaaacaaaaaacaaaaacagttctgcccagtgggattgtagacaagggagattcagggatttgttgaatcatctctagtcattttttttttttttcttgagacggagtctcgctctgtcgcccaggctgcagtgtggtggtatgatctcagctcattgcaacctccaccccctgggttcaagcgattctcctatctcagcctcccgagtagctgggattataggggctcgccaccacacccagctaattgtatttttagtagagacaggattttgccatgttggccaggctggtctcgaattcctgacctgttgatccacctgcctcggcctcccaaagcgccgggattacaggcgtgagccgctgcgcctagcctgtctgtagtctgtgtaatactatgactttggttttctcagaagtaaaactacgagagatgcataacattcataatttgaataatagaactataatacacactcttaacccctaggacctcaggatcctcatttgtcttattaagctgctgatctcaggccccttcaacagcagagagggtgtctagtttattctctgtacctggcacagtgcctgccccgctaaaggtgctcaggaaatctttgtggagtgaacaaatggctgcttgacagctgaccttctagttctaatattctaggaaaccaattgctcttaatgtaacaatgataaggggtgtacttagcattgaatagaaaagacttagatgaagagctaaatttgctgagtttttattttgaaataatttcaaatttacacgagaattacaagaatagaacaaagaacttttcttctgtgactttaacgctttttttttttcttttgagatgatgtcttcctctgtcacccaggctggagtgcagttgcatgatttcagctcactgcaacctccgcctcctgggttcaaatgattctcatgcctcagcctccagagtagctgggactacaggaatgtactaccacacttggctaatttttgtgtctttattagaggcagggtttcactatgttgaccaggctggtctccaactcctggcctcatgtgatccgctcgcctcagccttccaaagtgctgagattacaggcgtgagccactgcgcctggctggctgacattaacacttttgaagtgtataagcccattgttttgtagtgttgggtctcagaaaacaataccccaaaatgaaggcctcagaagcaacccacaaagcaagttgtttttttttttttttttaccttctgtcctcctctccctcaggtgcattctcccccgagcctagccagagaagttagaatcctcttccccaaggcaggtcatagaaaacagagtcatttacccccaaagccagccataaaaccctaaatataagctgggtgcggt[170 bp omitted]gcaggagaatcgcttgaaccggggaggcagaggttgcagtgagccgagattgcaccactgcattccagcctgggcgacagagtgagactctgtctcaaaaaacaaacaaaaaaaaccctaaatatattactcttaactttccctccttcttttggtgtaaaaactggccaaaaagaaattatctgacctagcttgtttgactgtaggccataagactccattccagagagggtcctcccccacacccagaaggaaggaatgcctgttccaagaggccaagaagaatctagacagacaggccttgctgggcctccccactcagtctatcagcattagatcataccttttatgttcaatcatttgcataaaaatgtacaatttcccctgtatctttgggtcttccttctgaaggctcccatatgtacatgttacataaatttgtacacatttttgactattactctgccttttgtaagttgattttttgcagcgaaacttcagagggccccttggcacctacagtagaatgtcccttaattcagatttgtctgatatttcttcatgattagattcagatgatgcatttttggcaggaataccacacaagtgattaataggagaaaaggcatacacatgtatttgatcatagttttgctttgttttgttttgtttgagacaaggccttgctctgtcacccagactagaatgcagtggcgcaaccatagttcactgcagcctcaaactcttaggctcaagcattgatcatagttttatttatttatttatttattattttttcaggcagagtctcactctgtcgcccaggctggagtgcagtggcatgatctcggctcactgcagcctccgcctcccgggttcaagcaattctgctgccttagccttccctgtagctgggattacaggcacccgccatcatgcctggctaatttttgtatttttagtagagacggggtgtcaccacattggccaggctagtctcgaactcctgacctcaagtgatctgcccgccttggctcaaaaaaaaaaaaaagaaagaaaaaaggaagaggcccggtgaggtgtctcacgcctgtagtcccaacactctgggaggccg[134 bp omitted]gaggcaggaaaatcgcttgaacccgggaggcagtggttacagtgagccgagatcccgccactgcactccagcctggcagacagagcgagactccatctcaaaaaagaaagaaagaaagaaagaaaaatgtataatcattataccagcaaattcctccctcggtgagaattgcatagcaaccccagcatcctccccacctctttttccccagatccaccagaaaaacaggaacatctagtggggacactcctttagtcccctcatgttagtgagcacacactcgtgtacactagcccttcataattgttatctccccctgttttagacaaccagtgttttcatagcctatgccacctctataaccacctgatgggttcccacagcacaaacgaaatcatttcatggagagcatggcattacagtcaagaaagactaattgacacaaggctggccacaccacgtgggagttggtattattagtcaatcttctggaaggctcagagattagacattatttaaatgtagtttcggggaaggggtggtggcagctaggcaatgggtgcttgctgctgattggttgggggtgcaaccttaggggtgtggcaaatggtcctcctgcaggctgagtcacctctgaggggggccgcaggagtggtgggtggggtccatgtggagttgttggtgtcagacatgcaaaaaacctgaaaagatatctccaaaggccaatcttaggttctgcaatagtgatgttatctgcaggagtaactggggaagttgcctagcttgtgacccctggaataatggctggcaatcttagcagagttcgggcttctctgtgctcctagcctggtggtttctcattagctttacaaaggtggctgcgttttagggaagggctattttcatttaaactgtaaactaaatgtctcccaaagttagcttggcccaaatccaggaataattaagggcagcttagaggccaaaggcaagagggggactggctagatcagctctcccccgctgtcctaattctctcactgatacaatttttgcaaaggacatcttacttctctatcaaactatgactctgaggaggagatctttttgctcattgttggccattatgggctgtacaatgtgttccttgttctgaagaaataatggtcggctttccaaatctgtgcactgtctcttgttctactttttcatttttttaaatttaattttgtttttgtgagacagcatctcactctgtcacccaggctggagtgcaatggtgcaatcatagctcactgcagcctcgacctcgcagactcaagcgatcctcccatctcatcctcccaagtagctgggattacaggcatgcacgaccacacccggataatttttatatttttagtagagacgaggttgccctcaaactcctgagctcaagtgatctgcccgcctcagcctcctcaagtgctgggattataggcatgagccactgcacccaaccttgttctgattgttttgaagcatttgtagcttctagcaggtaagcaaagcccagtccagagtcacagtctgttcctgtcaaggaacagagttcagtggtactgccccagagctaccagcatgagtctcacttgccagctatgatcaggaccttccaccacgttatctgcaccatagccacaggcagtctctgtctcttttgctgacaaacagaacagttcttcctggcactatgtgcctgagagggtgcaagaggaacgtgttgatgaagagagtcaaattgggcaaggcgcggtggctcatgcctgtaatcccagcactttgggaggccaaggtgggtagatcatctgaggtcaagagttcgagaccaggctgacaaacatggtgaaaccccatctctactaaaaagcactgggattacaggtgtgagccaccattctgggccacacatagctttttaaatattgttttggtttattattattttgagacagggtcttactctattgccgaggctacagtatagtggtgtgatcatagctcactgcagcttcaacctcctgtggtggtgatcctcctgcctcagcctcctaagttgctgggactacaggtgagagacaccacacctggcccatttttgtattttttttgtggagatgggctgttgccatgttgcccagactggtcccgaattcctagtctcaagggatccacctggcttggcctccgaaagagctgggattacaggcatgagccactgtgcctggcctaatgttttaattttttcatagagatgaagtctcactatgttgtcaaggctggtctgtgtttgttttttgtttgtttgtcttgctttgttttttgagacggagtctcgctcttattgccctggctggagtgcaatggcacgatcttggctcactgaaacttccacctcctgggttcaagctattctcctgcctcagcctcccaagtagctgggattacaggcatgcgccaccatgcccggctaattttgtatttttagtagagacagcgtttctccatgttggtcaggctggtcttgaactcctgacctcaggtgatccgcccgcctcagcctcccaaagtgctgggattataggcatgagccactgcacccggccatgtttttttttcttttttttttaatacatgaatgtatattatatcaaaaaaattttttcttttttatatatattttttattatactttaagttctagggtccatgtgcacaacatgcaggtttgttacatatgtatacatgtgccatgttggtgtgctgcacccattaactcgtcatttacattaggtatatctcctaatgctatccctccccccaaaaaattttttttttaattttaaaacactgcctactggaattagtcttcaagatgctgttggtctcatatatctgctaatctctgttttgtagtctatccggtttatcaggaatcttcaaaatccctctcaactatttggttacaggagcccatgatgctgcccaaacctgggacctattacctcccctgggaggttagtgcaggccaagttcctgatgggagcacgctgagaacatttggcaggtgagaacggttatttttttcactggtgggggtgatgatatgttaaatgtctttctctacctccaaaaagacataattagaaaagatttttataacttcatctaattatgttaaaatactaaaaaaaaaattagttgccgggcgcggtggctcatgcctgtaatcgcagcactttgggaggccgaggtgggtggatcacctgaggttgggagtttgagaccagcctgaccaacatggagaaaccctgtctctactaaaaatacaaaattagctgggcgtggtggcgcatgcctataatcccagctaatcgagaggctgaggcaggagaattgcttgaacgtggaaggtggaggttgtagcgagccgaaatcgcgccattgcactccagcctgggcgacaagagcaaaactctgtctcaaaaaataataataataaatatatatacatatatatattgaaaaaattaatattcattgtaaaaagtgtagatagtccataaaggtgtagagaggaaggaaaagtcacccataatcccattacccagacaaccactgctaacctttggtgattatcctcgtgcttttccatatgtatgtgtttgtatatgtgggtgggtatggagacacccaatatacgtatatacatatatactctgtcagttatttatcagttatatattgctatgtaacatattacccatacacacaattttagtttttcgtagagacagggtatccctatattctcaaggctggtgtctaactcctgggctcaagcgatcctcctgactcagcctcccaaagtgctgggattacaggcgtaagccactgtgcccagcctcccccaaatttaaaataattattgtctcatagttactgtgggtcaggaatttgggagtggtttaactgtttggatctggctcagggtcgctcatgggagtggcatccagatgttggccagggctgcagttatctggaggcttgactggggccaggacctctacttccaagatggcttgttcacgtttggcaaattagtgctggctcttggcaagataactcagttccagacaatgtggatttctctgtagttctgtgtgagggtcctcataacacagcagtttctgccagaagcagtgaccaagagaaagagcagggtgaaaaccacagtgtctttcatgacttagcttccagagtcagtctcagtcatttctgcagtatcctactgattacacaggtcagccttactcagcatcgtaggggatgcacaaggatgtaaatatcgggggtgagaatcacaggggaccatcttagagacacgtgtacatacatatagaagtattttaacctaggccaggtgcggtggctcacgcctgtaaccccagcactttgggaggccgaggcaggcggatcacctgaggtcaggagtttgagactagccggaccaaaatggcgaaaccctgtctctactaaaaatacaaaaattagccgggcttggtggtgggtgcctataatcccagctactcaggaggctgaggcaggagaatcgcttaaacctaggaggtggaggttgcagtgagctgagattgcgccactgcactccagcctgggggacagggtgagactccatctcaaaaaaaaaaaaaaaaaaaaaaagactagtattttaacctagcctgggtgcggtggttcacgcctgtaatgccaacactttgggaagcctaagtgggcagatcacctgaggtcagaagttcaaaaccagcctggccaacatggtgaaaccccgtctctataaaaaatacaaaaattagccaggtgtggtggcaggcgcctgtaatcccagctattcgggaggctgaggcaggagaattgcttgaacccgggaggcagaggtggcagtgagctgagatcatgccattacactccagcctgggtgacaagagtgaaattcggcctcaaaaaaaaaaaaaaaagaagtattttaacctagttaagggctgggtgtggaggcttacacctgtgatcctagcactttgggaggctgaggtgggaggattgcttgagtccaggagtttgagacaagcctgggcaacatggtgaaaccctgtctctacaaaatatacaaaaaattagccaggcatggcagtgtgcgcctgtagccccagctactggggaggctgaagtgggaggatcacctgaacctgggaggtttaggctgcagtgagccgagactgcaccactgtactttatcctgggtgacagagtgagatcctgcctcaaaaaaaaaaaaaaaaaaaaaaaaaagaaaagaagaagaaagcaatattttaacctagatgagatcctattatattactgtattgtagcatttatttacttagctgtgtatggtagacctagtgccatctcagacatgtagatctatatcatcattttgaatggttccattttgtttcactgtggtgatattgcatcatttacttagccaagtcttttgtttttttttgagacggagtctaactctgtcaccaggctggagtgcagtggtgcaatctcggctcactgcaacctctgcctgccaggttcaagcgattctcctgcctcagcctcccgagtagctggtattacaggcaactgccatcacacccggctaattttttttattttttagtagaaacggtgtttcaccatctt[133 bp omitted]tttttttgagacagagccttgctctgttgcccaggctggagtgcagtggcgcgatctcagctcactgcaagttctgcctcccaggttcacgccattctcctgcctcagcctcccaagtagctgggactacaggcacctgccaccacgcccggctaa[137 bp omitted]acctggccttttttgtttttttaaattgagatggagtcttgctctgtcgccaggctggagtgcagtggcgtgagcttggctcactgcaacctccaactccctggttcaagcgattctcctgtctcagcctcccaagtaggtgggattacaggcgtgccccaccacacccagctaatttttgtatttttttaagtagagatgggatttcaccatgttggccaggatggtctccatctcttgaccttgtgatctgtctgcctcagcctaccaaagtgctgggattacaggcgtgagccatcgtgcctggctttattgattttcaataaagacatcaagataattcagtagggaaagcatagtcctttcaacaagtggaactactggatattgacactgtgtcgcccaggctgaagtgcaagtgacatgatcatggctcacaacagccttgacccctcagcctcccaagtagctgagaccacaggcgtgcaccactgtacctggctaattaaaaaaaaaaaaaaattatagagacggcatctcgctgtattgcccaggctggtctctaacacctgggctcaagcaatcctcttgcctcagcctcccaaagtgctgggattacagatgtgagccaccatgcccaacctagatttttttttttttgagacggagtcttgctctgttgcccagactggagtgcagtggtacgatctcggctcactgcagcctctgcctcttgggctccagtgatcctcccgtcttggcctcccaagtatctgggaccacagctgcgtgccaccatgcctggctaattttttttatatttttagtagagacagggtttcaacatgttgcccaggttggtctcaaactcttggactcaagtgatccatctgccttggcctcccaaagtgctgggattaccagcatgagccaccacgcccagctagatattcttatggtaggggaaaacatcttgatctttacttcacaacatacaaaaaaaaatttacactgtgtcatagattacaagctaagactgaaatgtctcaagtaaacagcagaatatctttacaactttgagtaggcaaagatttcttttttttttttctatttatagcatttgtagcccatattgaaaaaaaaaagatggccaggcacagtggctcatgagtgtaatcccagcactttgggaggctgaggcaggtggatcacgtgagcccaggagttcgagaccagtgtggacaacatagcaaaaccctgtctgtacaaaaaattaaaatattagccacgtgtgatggcaagtacctatagtcccagctactcaggaggctgagatgggaggattgcttgagcagcctggaaggtcaaggctgcagcctgggatacagaaaaaaaaaaaaaagaaaggaagaaaaagatttcttagacaagacatagaaagcaaaagtcataaaagaaaaaaatgatcaggtgtggtggctcatgcctgtaatcccagtactttgggaggctgaggtgggtggatcccttgaggtcaggagttggagaccagcctggacaatatggtaaaaccccttctctactaaaaatacaaaaattagccaggcctggtggcaggcacctgtaatcccagctactcgggaggctgaggcacaagaattgcttgaacccaggaggcggaggttgcagtgagccgagattgctccattgcactccagcctgggcaacaaagcgagactccatctcaaaaaaaaaaaaaaaaaaagaaaaaagaaaaagaaaaaaatgaataaactgatcatcaacaaaattaaaagcttctgcttatcaaaatatgccattaagaaaattgaaggcaaggagatgaaaattaaaaggaattccttcatattctacagtgtagactgaaacatttttttctggtttgttgctgcaatttgcatttctgtgatgagactgaggctgaacacttttctatagatttcttggccatgcaaaccttttgagcgtggtggtgattctacgtatggatggaaattattgcatttcttctgccttccaggttgtgcctctatgacatgattcagtccagagtaacactgatggctcagcacggatccgatcagcaccaggttcttgtctgtaccaagttggtggagcccttccacgcccaggtgggctccctgtacatcgtcctcggggagctccagcatcagcagggtgagctgcagcctcagatcccctttctcatcctggggcctgagctggggcagtcttcggggcagtcagtgagaaatgggctcgtgacccaacagcaatgtctcatcagggttaatgtttcttccaaattagcccacaagttcaacactcttgaggattcaactcagagtggactggcctcatggtgccaactcaaagacagggtggctggtcaggagttcgagaccagcctagccaacatggcgaaaccccatccctactaaaagtacaaaacttagctgggcgtggtggcatgtgcctgtagtcccagctactcaggagactgaggcaggagaatcacttgcaccagggaggtacaggttgcagtgagccaagatcgttccactgcactccagcctagatgacagagtgagactccgtctcaaaaaaaaaaaaaaaaaaaaaagacaggtacagtgaagagacaatcccccatggggaagtgagaacgaggagagagaaaccactaatttctcaaggcctacaacacaccaggcctgatgtgaggcagcttgcttagatctttttgaatttgcctgtcagcctttaatctgagtcttaaaaattttttttttttagtttttttgagacaagatctctctctgttacccaggctggagtgcagtggtatgatcacagctcactgcaacctccatctcctgggctcatgaggctcccacctcagcctcctgagtagctgggaccacaggcgtgcaccaccacacctggctaattttaaaattttctgtggagacaaggtgtcattattttgggatgagggatctgcgtgccttggcctcccaaaatgctgggattacaggtgtgcagcac[359 bp omitted]gcagtggcgcgatctcagcccactgcaacctccagctccctggatcaagcgattctcctgtctcagcctcccgagtagccctgcctgcttctgattcttactgctggtttttttttttttttgtctcgagacagagtcttggtctgctgtccaggctgagtgcagtggcgcgatcttggcaccaggctctatcctgccatttctgtatggattgcctgtagtggaaaccaaatggttgatgaaggaaagttatttcttttttttttttttttgagacggagtgtcgctctcgccaggctggagtgtagtggcatgatctcagctcactgcaacctccgcctcccgggttcaagcgattctcctgcctcagccttccgagtagctgggactacaggcatgcgccaccacgcctggctaatttttgtatttttagtagagatgggggtttcaccatgttggccaggatggtctcgatctcttgaccttgtgatctgcccgcctcggcctcccaaagtgttgggattacaagcgtgagctaccgcgcctggcctggaaagttctttagagaagagtcacagcgaatgaacgcaggagaaatccgtaaattcaaagtcatcactttaaaagccctgacaaaataaaaaatccaggcaacagtcctcgctagtggccaaaatcattaggaaacatcttgatgagatcattgtgatggagggacccgccagcagtgcctaggctggcctgatcaatgtcgacgtgataaaaatcagaagggcaaacatcaggtacctccgatgtgagtcatgaggaagacacacatagc[145 bp omitted]cccgtctctactaaaaatacaaaaagttagccgggcgtggtggcacacgcctgtagtcccagctactcaggaggctgaggcaggagaatcgcttgaacccgggaggcggaggaggttgcagtgagcggagatcgtgccactgcactccagcctggcagagcgagactccatctcaaaaaaacaacaacagaagaaaaaacaaaaaaaattgaacctgaagctaatcaggcctcagaggaagtagcctgttaccgggcactggctagtttagtactcttataatttgcatcacaacctgttttttgtggggttttttcttaaaacatttttgtcgctgggcgcggtggctcacacctgtaatcctagcactttgggaggctaaggcaggaggatcaccggaggtcggaaattcaagaccagcctgaccaacatggagaaaccctgcctctactaaaaatacaaaattagctgggcgtggtggtgcatgcctgtaatcccagctactcgggaggctgaggcaggagaatcgcttgaacccgggaggcggaggttgctgtgagccgagatcgcaccattgcactccagcctgggcaacaagagcaaaactccgtctcaaaaaaaaaaaagaaaaagaaaaagtttgtcttgattttctcttattttttgtgagacggagtctcactctctcactctgtcacccagcctggagtgcagtggcgtgatctcagctcactgcaacctccgcctcccaggttcaagcgattctcctgccttggcctcctgagtagctgggattacaggcgcctgccactgtgcctggctaagttttgtatttttagtagagacagggtttcaccatcttggccaggctggtcttgagctcctgacctcatgatccacctgcctcagcttcccaaagtgctgggattacaagcgtgagccaccgcgcccggcctgtcttgattatctaagtcatacacgctcgtcattcacggagggaactcgaatcaaagatgaggaggtgggaggagagcatcctggctgactgtgctctgtccaccctgacctctggcctgggcagagggggcaccctgtggctgctttaaacctccctgtgaaaaccaagtgtggtggctcatgcctgtaatctcagcaatttgggatgccaaggaaggaggactgcttgagatcaggagtttaagaccaacctgggcaacatagtgagaccccatctttacaaaaattaaaaagttatccaggtgtggtggcacaggcttgtagtcccagttacttgagacgctgaggtggcaggattgcttgagtccaggagttcaaggttacagtgagccaagattgctctactgcactccagcctggatgacagagtgagaccctgtttcaaaaaaaaaaaaaaggaaaaaaaagtccaggtgtggttgctcacacctgtaatcccagcactttgagaggctagggagggaggatcgcttgagcccaggagttcaagaccagcctgggaaatgtagcaagagcctgtctctacaaaataataaataagtagaaataaaaccataaaccttcctgtgccaggcccaaagctctatggggacacaaaggttgatcagatgtgaatcctgccctgtggccagactgacagtactgaggacaggtgagaggtcacccttctcaaatgtttgcctaagagctagctaagaagaccaacaggtgaagacatgctggtgtgtgataaaacccatggacctgacacccgctggcgccatccaaaggcccgagggccccctgttctggaactaaggtgtggggcacagcctttcccaggcctactccagaggccctcggagcatgcccaggctgaagggcactggaccacagcaaacagcaagcagctgcccacaagcccttgccatgcatcctctgccttctgcttttctctcactgcacccctgcactttgccctcagaaaccttccttgtgtggctgggctcaggagctcactaatctagcatgttcggaggctgaggtgggaggatcacttgaacccaggagtttgagaccaacctgggcaacgcagagagacgccatctctacaaaaatgaaaatattagtggggtgtggtggcttgtgcttgtagtcccagctacttgggaggctgaggcaggaggatggcttgaggcaggagttcgatgctgcagtgagctatgatcatgccactgcactccaacctgggtgacaaaatgagaccctgtttctaaagaaaaagaaaagaggctgggcacagtggctcatgcctgtaatctcagaacttttgggaggctgaggctg[142 bp omitted]tgaaaccctgtctctacaaaaaatacgaaattagctgagcgtggtggcacatgcctgtaatcccagctattcaggaggccaaggcaggagaatcgcttgaaactgggaggcggaggttgcagtgagctgagatcacaccattgcactccagcctgggtgacaagagcaaaactccatctcaaaaaaaaataataataataaccagcctgggtaacatggtgaaaccccgtctctacaaaaaatgcaaaaattagcagggtgcgttgttgcacacatgcctgtagtcccagctactggggaggctgaggtgggaggatcacttgagccagggaggcagagattgcagtgagctgagactgtaccactgtactgcagcctgggtgacagagtgagaccctgtcaaaaaaaaaaaaaaaaagagagagagaaagaaagaaaaagaaagaaaagaaaagaaagagaaaagagaagagaaagggagggagggaaaccttcctgtgtgtcccctgtgcacctccctcttcgagcatccttacagctctgggacttgcccaaacctttctccccaaaccacacacccacagagtctggagcagggccggagtttccccggctcctcgggtgtgtcagcatcacacatccctccctgtctccctgctgccaaccagttccaccactgtgcacctctgccccaattccacctcccacgcctgctgctgcaccttggacttgttttcctgaaattgcatgccatccactctcccttctacttctgctgcgtccctcttgccctatcaggacctgtggactcaggactcccgggctttctcccccatctctcttccccgttgggcctcactaccatttcagccactttcctggcagcttcactcctgccccaagaccccagcctccaccctcctggttctgccaactgttgagtgcagaaagatcacagaactccaaggatttggagctcaatgatttcaggggctcactggcattcccctgctctgcctagaaatccttcctgtgtcctggccacacccccctccccggcgccaccacagctagtccagaaattcccctgcctcacaagaacccacttcctctcctcccctgtccctcccggcttattgctttatgagccagctagaatcgaggccacaggcagccgttcttcctcctaccatcagacactgaaacggccaccgaccatcagacactgaaacggccaccgttagctccttcctctagtctaagaggaagcggggtccctcctacctaaggggttaccacagttcttccctgtccacatataaggtgttcaagcctcctctatatggaaataatagtctcaatgacaagaagtcatcttctacactagagtctgacctacctgcccatgaccttccctccctttgcagacaaacctcctaaaagaacatctgtgctccgtataaccccttcctcttcccaggcctcaccccactgcattctgactgctttttataacccaggcccttcttctttgctccaggttcttaatctttttttttttttcctgagatggagtctcgctctgtcacccaggctgggagtgcagtggcacgatctctgcttactgcaacctctgcttcctgggttcaagcgattctgcctcagcctccctagtagctgggattacaggtgcccgccaccacacccagctaatttttgtctttttagtagagacagggtttcaccatgttggccaggctggtcttcagctcctgacctcaggtgatccgcctgcgtcagcctcccagagtgctgggattacagatgtgagccactgcgcctggcctttttcctttttttttccttttttttttttttttgagacagagtctcattctgtttcccaggctggagtgcagtggcgcaatcttggctcactgcgacatccacctccccggttcaagtgattctcgtgcctcagcctcccaagtagtcgggcctgggtaacttttgtatttttagtagagacagggttttcgcttgttggccaggctggtcttgagctcctggcctcaagtgatctgcttgtcttgccctcccaaagtgttgggattacagtgttgggagccaccgcgccacgccccgattcctctctgacctgtgtcagcactggggctaacagaagctgagacacacaggcaacctcatgtttcaaatgagttcattgcctaagggtagcctgtatagacagctaggcaggatgacaccctgaattctgccctcaggctgtgctataaatgacctagactagaggaaagggcaggcagagcctttatctcaaacagcgtcaaaagaaaacaatgtaatagcctagaacattgaatctatttatttacttattttgagacagagtctcactctgttgcccaggctggagtgcagtggcttgatctcggctcactgcaacgtctgcctcccaggttcaagcgattctcctgcctcagcctcccgagtagctgggtttacaggtgccagctaccacacctggctaatttttgtatttttagtagagacggggttttgccgtgttggccaagctggtcatgaactcctgacctcaggtgatccacccatctcggaaatctatttattaaagtgctcagagagcagaaagagcatgagtgcaaaaaatttttttaacttttttttttctcttgcaagctatgactggggaaaaaagaaagaaaaaaaaaatgtcagcaatgcacagtggctcacgcctataatccatgcatgttgggaggccgaggcgggcagatcacttgaccccaggagtttgaaaccagcctgggcaacatggcgagaccccatctctacaagaaatacaaaaattagctgggtgtggtggtgcgtccctgtagtcccagctcctcaggaagctgagatgatcacctgagcctgggaggtggaggctacattgagccatgattgagccactgcattccagcccaagtgacagagcaacaccctgtctcaaaaaaaaaatttttttttttaggtggagtcttgctctgttgcccaggctggagtgcagtggcgtgatcttggctcactgcaacctccacctcctgggttcaagcaattctcctgcctcagccttccaagtagctgggattacaggcatgcaccactacacgcggctaatttttgtatttttagtagagatggggtttcatcatgttggccaggctggtcttgaactcctgacctcaagtgttccacatgccttggcctcccaaagtgctgagattacaggtgtgagccagttcacctgtcaaaagaaagaaaatttttaaaaagtctctcggagatgtctttcctgtttggtgccacctgaatagtggcaaacctttccattatgtatcaggtcaccaccgcatctgctagaagcccccctcgtccagggtgggatgacctgctcctataaagccaaacttaccgggagctcagtctcttggatttttaaaatatgggtgtctcttttccccggttcctgatgacattgtgtcccaaggtgccaagggggcctttccctcagtccagaggggttttctgaccacctgctaagttccagacacgggccgactgtgcatgacaggcccacggttctaggcccaaatactcagttgcctttgccccatatgctgttattgtccacatcacttgctgccaaaacccaggactgagctgtggagggaacagctggaatgcaccttggaggacgttgttgacacgccgctcagtcgccgttcgtgccctggtgtttgtcttgcagacagaggctccgtggtgaaggcgcgcgtgctgacctgtgtggaggggatgaacctgcccttgttggaacaagccatccgggagcagagactgtacaagcaggagcggggcggcagccagtaggaaacagcagcctagcaacaccctcacctgcttcagagcccgaaccctctggagctgcaggagcccgggagagcacagacgcctccccagcgacggccttgtctggagctcgaaagccgaggggcgggtgatgaatccagccccttcccctactttgggattggctcagcaatgagaacccagaaagcatgccataaatccgacagccccaccccaggagactgcaggtggccgagcttgggcgccggggccgtgcttggtgtggggccatggagggttccagaaggtcctggtgaataaaggcccagggggcgtgctcttgaagtgtgctcgtggtgcagcgccggcgggggccaggagggggagctgcaacccaggctgtgggctgcagcctctcagggcttctggtgaattctgggcctggggcctcagggtagggcaccaggggcccaggggctggggtggggggcccaggatgcaggggtctgcccctggccaggctctgccttcagaggaggctgagcgtcgtcacacgggccgggctgaggccctgggccctgaccgtgcagcctaagacaggactgtggctttaagaccctcctgacccctgacctctgcccccagtggccctggcccctgggcagcccttcctggccgccatgtgtacccagagcctgggactggctgggctgggcagtgacccaggtgggaaagggtggtcttgccctctaaggcccggcacaagtgagaggcctgggggtccatgttgggctgggctgggcgaggggtggtctctgacttcctgggggttctggctgggatgggcagggggctgggtgggagagtgtgggccctgccctccgaggccgggcatgggcgagaagcctgggggtcctggctgaactgggctgggtgaagggggccccctgacccccttggggtccgggctgggctgggtgaggggcggtttccgacccccagccaggttcccaggcaggatgagctggggttggggtggctaggccgtgggccttgggagctgggcagtctgggctgggctgggctgggcagggcgccacatggaagctggaggagcaacgggagcgctgggcgtggggtgcaaattgcccggtgccttctgtttcccaggcagctctgtggccatggatatgttccagaaggtagagaagatcggagagggcacctatggggtggtgtacaaggccaagaacagggagacagggcagctggtggccctgaagaagatcagactggatttgtgagtgctgggacggcccctgagttacccaccctgggccatcacaacctgggcgctccctgatccgttccctctttcctggagtccacgtttaactcctctgggtgctgcccagcagcccttacctgtcctctccccagttcactgccttctgaccagcctttgccggggccctgactgtggagtttggtggatgacgtgccaaggagcacaggtctccattgccggggccctggtcattctgtggggttaaggagaagccgatccccctggctggaagtgcccttcttggcccaagtctctgcccacggctgtgcccttgtttcttgcagggagatggagggggtcccaagcactgccatcagggagatctcgctgctcaaggaactgaagcaccccaacatcgtccggtgagttggggattgaggtggggaagctgggatggcgaaggtagcatcctgactgccatctccctgtcagactgctggacgtggtgcacaacgagaggaagctctatctggtgtttgagttcctcagccaggacctgaagaagtacatggactccaccccaggctcagagctccccctgcacctcatcaaggtagggaaggaagggcagggaaggagaggtgacaccccatccctgccatccctgtccacgcagcacctccgctcagctggctgcacctcgcgctcgtttctccagagctacctcttccagctgctgcagggggtgagtttctgccactcacatcgggtcatccaccgagacctgaagccccagaacctgctcatcaatgagttgggtgccatcaagctggctgacttcggcctggctcgcgccttcggggtgcccctgcgcacctacacccatgaggtattgtgagacaaagaggagagaggggcagcaggaggagtgtcacccatgcactcagccaccctgagtgatactgtttctttgccctgcaggtggtgacactgtggtatcgcgcccccgagattctcttgggcagcaagttctataccacagctgtggatatctggagcattggttgcatctttgcagagatggtagagagaggggcacacatggccacagggtgccacaggcagggtcctactggggttgggtggggtccactgatgctcccattcgaggcggattaaagagtgtttggggctggacatggctcacgcccgtaatcccagcactttgggaggctgagatgggaggatggcttgagcccaggagtttgagaccagcctgggcaacgtaacaaatccccagctcttaaaaaactacaaaaattagctgggtgtggtggtgcatgcttgtagtcccagctacttgggaggttgaggcaggaggattgcttgagcctgtggttgaggctgcagtgagctgtgatcgcacgactgcactctagcctgggtgacagagcaagactccgtctctattttttaaaaaaaggtgtttggtactggctaaaggactgaggaaggtagctttattccaaaagaggccagaattctttgcacagtcatggaaaagatatcttgacaggcctctccctgggtctggccacttatctggtattggattctgtataacaaagtggcggaccccacaccttctcttcttccccatttcaggtgactcgaaaagccctgtttcctggtgactctgagattgaccagctctttcgtatctttcgtatgctggggacacccagcgaagacacatggcccggggtcacccagctgcctgactataagggcagcttccctaagtggaccaggaagggactggaagagattgtgcccaatctggagccagagggcagggacctgctcatggtaggtgcatgtgggctccagctgctgctccgactacagtttcccctcatcagccagcctcttacataaccctggcactttctgagtccaaggccagggtctctttcctgacctttgtacacaactggcttgggtatactgattgttcaacccggaagcctcccccaggataagtgcagtatttatcttccctgtgaaagtggcgctcattgagttagctctgtctttatgctgtgctacacgccctttttccctagttgtcttgtgtgtttggttattctactttgtggacattactgctccatctaagctgtatgcctccccaggctggggccataccttcttttcttttcttttttttgagatggagttttgctcttgttgcccgggctggagtgcaatggcgtgatctcagctcactgcaacttctgcctcctgggttcaagtcattctcctgcctcagcctcccgagtagctgggactacaggtgcctgccaccacgcccagctaatttttgtatttttttttttagtagagacagggtttcaccatgttggccagactggtcttgaactcctcaggtgatctgcccacctcggcttcccaaagtgctgggattacaggcatgagccactgtgcccggctggggcctctcgttctactgcctggctgttcccctgtgactcctacagtggtcagtcttcagaacaggctgttccctactgcctgggcccatgccacagttctcactcacccctcctgttggtgtcttgagctgacccaggccggactgcccaggaagtctctggcagaaccgtctgtttttttttttttttttgagacagggtctcagtctgtcactcaggctggcgtgcagtggtgtgaccatgacttactgcagccttgacctcccaggcacaagcgatcctcccatctcagcctcctgagtagctgggaccacaggtatacgccactatgcctggctaccttttgtattttttttgtagagacagcatttcaccacgttgcccaggctggtctcgaactcctgggctcaattgatcctcccacctcagcttcctgagtagctgagactataggggtgcaccaccatgcccagctaattttatttttgtagaaatggggtctcactatgttgctcagactggtctcgaactcctgggctcaagcgatcctcctaccttggcctctcaaagtgctggggggatcacaggtgtgagccactgcgcccgtccactgtccattcttgcccacaaagtcttggagccacatttctctccttaatctggtgttgaatgagaggaaggtgggtcagtattttcatcttcaggctgtgtgtccagctctccagaagtctctgtgtgttgtgtacccgcccaatggcagcaggacggcacagactccagccaaggccccgagccctccagctgggctactccaccacagggggtccttccacatcctgtctgggtttagggactctagggcagagggctggacaggtttggcctcttggagtgtcagtccctgagcccccactcagtgttcctccctggacagcttcagtcccctgcttcctgatacgtggggttctgtgctcttcccaactagaagcaggctgggacctgggaccctccccgagaaggggggtgactcagcttcagtggcctgaggagacctgggtgactcgttaggactgtccagattccaggagtgtccggaactggctggagagctgggaggtcatggcttcatgcggttctgggtttgagggcagccaatttggggcccaggcccttgatctgggacctgggaggggaatttctcaccccaccctggctgcacccagaccacatcttcttccttctttcttcctagcaactcctgcagtatgaccccagccagcggatcacagccaagactgccctggcccacccgtacttctcatcccctgagccctccccagctgcccgccagtatgtgctgcagcgattccgccattgagaatgtcaaggccacactcagatcctttctcgagcagctgctgccccagctgcctcctacccattgccaagagaggatgcatctggggagagcaaagcactaaggaattcagcatcagcctgcagagggctgagtctgggttagtcctgcccgcaggttagcgagatcctgtgttgttttttgggttggacggtgccgtttcaaaatagaggcacagatgctccatgcacgaggggtccccgggcactggaacaagtgccaagttgaaggcagggggcctgccagagctgggtgtgggtattcaggccctcacctgccctgcctgcagggccagaccctgaggaaagggcgccccctgctggtctttttggatttaaaatgtttgggggaagagttgagttccagttcagtcccaagttaaacaggagggagtgagggagaggagagagggcgttccccggatcccaggagagctgggctatgactgcaataaggagttgttccttcacctgagatgtgcttcttttggttcatttctggcttgacaacaataaataaacgtggtatgttcctgagttttctgattgttctgctcacaggggacacctgggcttcctgacaaggggaacattgacacagggctggagacagctctggcccaaactgagacag[138 bp omitted]cctctgcctcatgggttcaagcagttctcctgcctcagtctcccgagtagctgggattacaggcatatgccaccaagcccccatttttttttttttttttgagatggagtctcgctgtctcaggtctaccctgttgcccagggtagagtgcagtggcatgatctctgctcactggaacgtccgcctcccaggttcaagtgattctcctgcctcagcctcctgagtagcgggaattttaggtgtgcaccaccacacccagctaatttttgtatttttagtagagtcggggtttcaccgtgttcgtcaggctggtctcgaactcctgacctcggatccacccgccttggcccccctaaatgctggtattacaggtgtgagccactgtgcccggcctcctttagtgattttaaaccataatctctttccatgacctgccactgcatccctgccccgcactcaaggaggcacagccctccgaggatgcctgtttcccaggcaggcaaattgagcacgtccgcccaggcaaggacttgagcaacgctgtccttgcactcatcccccagacacatgggtcctgcactctcaaatgtgaatgaatgggacaccacatggcacggggagacagaattcgtttattgggatcactgggtggaggtggaggaagaactgagtggctgctgtcctggtctggggatggatcaggcaccaaggttaggggagggagcccatcaccatgttagtaaaataataaaacagtggttggacagagggaagacccactgcctgggatgaggctgctctgaggcaagaggtgtacgtatcctacctggcccaacacacgcacttccccactggctccttggcccgtgtcagcgaagggagcgcgggacggtgggggaggcggagcggtagcagcggtacccctccagtgccgctggcaggagcagcaggccgctcagggggtctttgcggcagcggcccatggcctccttgtagctcagccgttccttggagatggggtctgtcaaatccttctcgtagctggactcgtcctgcaggagctgggccagctcttcactgatcatcccggagaggagggcctgctggatggggatgcggcctgtcctcttggggtcgatgagccccccggtcaggtgctgcacctgcaggtgtgggagcacgctctcccggggcatccagcccttctggacggcctcgcccaccgagagcctcttcttggtgacggggtcctcgatgccggtgaaggccttctgggcgttaagcagcctctgtgtggaggtgttctcgatcaggcccctctccatcgccttgtgcacagagtagcgctcacggctgagcaggtccacgatgccccctgtggccgcctgggcctccagtagcttctgcccagtgatggggtccagcatgttcttggccacggccgtcttgatgctgcacttgttgtctgtggttgtgtcatagatcccggcgatagggaagctgtcatcaccgagcccgagagagaagctgggagagaagaaactggtgctctggggggccggggaggcgagcggggacttggagatgatagagccgatggagagtgaggagcttggcttggtctccccagctacaagcagcgcaaactcggagatgggcaggtggccgtccttgtacagatggtactcctccttagagatgcgccggcagcggagggcggcctcgatggagtactgcttcccgctcttgcggtccaggagcacagactcctccccacagggccccgaggtggtgacctcctcccagtcacactcgagctcctgcagctgcaagtactggcccctgtcgatgatgcccctcttgtaggcctcgtatggggacatgtccttccccgtctcgggttccaggatggagatcttggtggaaaggttggtctctcgcgtctgggtctcctggctgagctcctcccggctcaccttggcgtggaggtcccggagcgtccgctccttctcgtagatctggtccttctcgcggaggatggccgcctccagccgcgagagctcctggccccgctgggccgccttctgtcgctcgctctccgtcttctggctgagcagcttcgactcctcctgcagctgcagtgtctgctgctgcttctgcctctccagagcccgcagctcctgctgcagccgcccacactcctggtcggcctggtcccgggccctctgcagctcggactcctcccgggaccaggttctccccagcgtctcggcccggtcaatgcgctcccgcaggcgccgtgcctcctcctcccgggcctgccgggccgtgcgctccctgttgagcatctcccacacgcgggcccgctcatcttccaggacgcggtccttctgcacccggatcacttccttgtagatggtcttctcctgcgatttggctttctggaggacgtcaatctggacctgcaggttcttgcactcccgattcagctcggttacctgggtcttctcctggtccaggtcccaccgcagggcttccgtggacttctccaggtccgggtccttctccagcttgaccacttcctccatgatgatcttctcctgcaccgtgggaggccgcttctcgagctcctggatcctcaaggtcagctgccgcagctccctctccacggccagcttcttgctgcggtcctcctggaagctgagcaggccctcctgctcctccacgccggcccgcagctgctgcacctcaagctctagctggcgccgccggcccacctcctcatccaggctcccgctcagccggctgtgctcctcgcgcagcttcgggtccttctgggtgaccaccacctcctgcaccaccaccttctcctcgggcttcctcctctccagcagcaggcgcttgctctgcagctcgtacaccgcgtcctccgcggcccgcctcttctgggccgcctcccgcacctcctggcggagccgctctgcttctttctccagcaccgggtccttctcgtggcgcaccacctccttgctcaccgtcttggtctccaccttggcccgctcgcgcctccactcgtcgcgctcaccctgcaggcggatgagctgctcctgggagcgcccgtggctgttgacgagctcgttgagctgagccttcaggcggtcgatctcacgcagcacctcggggctcctctcatgcctcaccacctcctgggtcacctccttgtactccaccgtgggcttctgggcccgcaggacctccaggtcgggcagcagcttctccacctccttctccacaccgctcctcttgcccgccatctcctgcagcttggccttgagccgagtgatctcctgctctgtctccggatccacctggaagatctcgtggacgcgctcctggagctgcactttgggcctctgcttctccaccacgctgtacttgctgtgcaggtcgctcagctccctggccagcgtcgcgttcttggtcctctcctcctcgaggaggctcctcagcctggaggactcctggaggagccctgggtcctgctccaccttcttcacctccttcacgatgaccttgggctccaccgagctgatagcccgctccaggtcttcgatgcgagcctgtagcttggccacagcctcctccgcctgcttcctccgcgcagcatcctcctccatctgcagcctcagagcctgggctgccttgaccatttccagattcttctccaccttgactacctctttcaccacgaccttctccttcacgtccacctccctcttctcaagggccagtagctccttcttcagcccttccagccgggccgagatgacggcatcctccccgcggagctgctggatctggatcctgagctgggccgcctggctgtccaggccggggtccctctccacctgggtgacctccttggtcagcagatgaggctgcatggtcttcctcttgctttccagctgcacgaccttctgggctgccacttccaggtctgcctgcaggccagcccgccgcttgccctcctcctccacctgggccttcaccctggacaggctgccctccagctgggggtcccggtagaactctaccacttccttctcctccagcctctccaagggccgctgggtcctcagctgcagcagttggctcctctgcgcctccagctcatgctgcacccgggccacccgcttcctctcctcttccagctgggccttcagggcctctgactctctccctgcttgggcagggctctcggagccctgctttgcatcatgggtccttcggatgtcctcactgagctccttctgcagagaggaagaagggtagagcacggggtgggcggtagagataggagctccatgtttttcctgagatgaaagacccctccctgtttcctgagactccccagtgggtcctcagaggtggagctgaagacctaagatgcttggatataggattttgagaagacccagtcaatgcaatgattttaggacccaaggcagtgcgcaggcctggtttgcattagaaagtgcaagtaagggccaggtgcaatggctgatgcctttaatcccaacactttgggaggccaaggtgggcggatcacctgaggtcaggagttcgagaccagcctgatcaacatagtgaaaccccatctctactaaaaatccaaaaaattagctgggcgtggtgacgcatgcctgtaatcccagttactcaggaggccgaggcaggagaatcgcttgaaccagggaggcggaggttgcagtgagctgagattgtgccactgcactccagccttggtgatagagcgagactccgtctcaaaaaaaacaaaaaacaaaaaaaaagtgcaaacaggacaggttctccctgtccctccagaacctctcccttttccccttccatccagggaccctgactgtggccgagggtaacagaaaagctggcaagtcaccaggagtcctggagaagttctggcttgagggtgtgtaggccgaaggtggagagccaggtggctgagggtgaagctctaggggattttctctgctctctggggttagaggtcttgtcccattggaggatgcccagtggccatgaatgccatctccagggcctaaccctgggatggacaccagcctgtaagagctgctggagagaaaactgggtggctggaatccgctcccctctccagcagccagagctgcccaggggctgcaggcaggagggagaggagggaaggagactaccagggtgacagcctggcattttgggaatggagtgggcattcctggttattcctggctattgtgggaaagctgtaggtgttgtctgtgtaccttctccagcatttttctagcaaactccagctgctggagcagctgctgctgtgctgctgcaacctcagtataggcctttgcaaggttcttctcctggagaaggcagagggagaggggaagggcagagtcagctcctgccttggaccctacagagctggtgtcaaggtccactgagccccgcaaggtcccatctcacctgggcttggatgctctcttgcaggggagccactcggggtctcttgggggctgacactgccagggtgggctccaaagagcagcggtaggtgtctgcctggagctcatagtcctgagcagggaggaaaggacagcaggctggcaaccagtgggggaggctgggtgtgggggatagggctggaagagggacaagggtgatgcatggagaggggcaagctgaaggcaagctgcttacctggagcgctgcctgcagggcctgggagaggtgggatgctgtggccctgtcccgctctcggctctggatctcctgcgtcagcctctgccagggaagaacccagagtcaggaggccaggaaatgccaatcaccctgactctcctctagccagtgcctccagggccacagtcaggcagagctgcctcccagggacaagaaagggcagggagggagacctgggccaaactccctcctttccctgacatcattctctctgcttttcctccttcctctccgaggcaccttggcagaatccctttctttccttttttttttttttgagaccaagtctcactctgtcacccaggttggagtgcgtgatctcggctcacagcagcctcctgggttcaagcgattttcatgcctcagcttcctgagtagctggaatgacaggtgcctgccaccatgccaggctaatttttatatttttagtagagatggggtttc[133 bp omitted]agtagtatctgcgagcatcacctggggcctgtgggaggcaggcaggcatgcagggcccacctgcacatcagatccagcaggtccgggtggccctgagaatt[132 bp omitted]cctcagcctctcgagtagccgggactacaggtgcccagcaccgtgcccggctaattttttgtatttttagtagagatggggtttcacc[140 bp omitted]cagctcatccagaaccatggctccaattggaaagttctcaatacgggatgcccacttttattcacctgggaacttaatatactgatgctctgaccacaataatccaacttatttggtctggggaggggtcctggcctggggatgttttaaaagctctctgggagattctagtttgcagccagggctgagaatctctgtcccaggcccccttcccaatgtcacctccctactctctccccagatattctcattttccggcagtcccagacccatctttgctctcacgagctcctaggggaacccccagccccagttccctcccatatgcctacgtccacctccccgctgccctcggctgtcctggccacctcatttcagcatgacccagccggccccattcctctccccaaatatgctctgtttcctgtgttcccgcctcaagtggaggtgccccctcttcccagttgtccccaacagaaccctgggcatcaccgggccccgtccatctcactcactgtccccttcaagcagtcaccaagtccacctaattctgccatctccatctcagatctgcccacctcgccctgtgccatggtcccttccccggccaggccaccactctctctccgctggatttccaccctggctcctcgtgggcctccgtgtcttcattcccaccctcttagtcattctctacatggcagccagagccagcttctaaacactggcctggaagcatcccctccccagcagcttctgggggctgcaggagagagtgcagcctgggtcctgtgccggaagggcctgtgtggtctgcccatctggtcgccctcgcccctgagtccccctcctttcccctgactgccatgccttctgcatgggacatttcatccctcccccggctacacttgcttcctcccacactaccgatcctgacccgcaagtgtgtccagcctgggggcacccacagcactccagcttctcccaccaatgcttgtcggcatcacagacctcccccaccaggctgggagctgccagggtgcagggttgtaccccagtgaacacattgcctggtacatggcaggggcttgatgagcatgagaaagtggccggaaccctcagggctctgtggcctgagcttgtaaatcccactgccccagtcgggccagacagagatgggctggccccgtctgtgggcaaagaggagcatttcagctggaggccagggaaggggcccagggcctccgtggcctgggctttgaagccccttagagcgcttctgagctttggccactagggggccacatgggcacaggcagctgtccctgccccagcctcaccttctgcgcctgcagcttgtaggcgatctggctggggccgtcgctgggccgcacctggctgcggggcaggtgctccagccaggagctcaggttatccttgcagttcttgaactgctggtaggtgagggcggcatcctgcaccaccttctccctgcaggaggacgaggcccagaacagagataagacctgccccgtggggacaggggcaggtgcacagggaggctgatgggagcctcctcctgggggcaggtcaggaggcccgagtggcctgctgtgcagatccccactccctgaccctgggaattcagagatgggacagtctctaccaggcaccaccctgggaggtaagtgctgttgttatcccattttagagatgaggaaacagcttcagagacgtgaagtcactagcccaggatcacacagcttgtagacagcaatgcctggctctgcaccagcccacaccctgtgccccgaggacccagtcgctcaccgcaggtccagctggtcccctacggcgtggtagcggtcggtgagggctcgcacctggcgctgctggcgaggcaggtcttggcagaactcctggaagttgttctgcagggcagcgcatgcgtgctccgaggccttcagcgcgcggtgtagccgcagcacgcaggtctgctgttccagcagctccctccgctggcgctgcaggaggaggggacgcagccgtgcaccctcgtggctggggagacgccgtgtccacccacccgcccctgaatgctgggttcccctgacaccaggaggccccggctggtcccttacctgcagctcgctgaccctctcctgcagagcccccggttcagcagggatgggggcctcctgcaccagggtggcctcgaagcctcggatgaccctgtccgcatcctggatctgccgctccagatccagggcagccttggctctgccgcagaggaggcaaggctcagacactccctgggccacacgctgctgccctgcgtggctgccctgtccccagagcactcacttctccccgtagaggctgcacagaacctgcacgtcactgaacttgttcttcacgctgttgagggctacgggcagctgcagggcagcggggcccacgggccgcgtggacagaaacgcctcgcactccttctgggctgtctccttctccgttcccaggctctgcaggcgctgggctgtgccctaaagaggggcggggtcagggatctctgggcaggtgggttccgcccgactcttctaccaggataccctaactctgcgcccatggaggcagtagagtgtggtgggtacatgcttgggctcaggccagagaactgcgttcagtcctggcgctactcgttcctctgtggatgacctggggcagagcaaactgtctgaccctcagtctcctcatctacaaaatgactgataggaggggccgggcgcagtggctcacacctgtaatcctagcactttgggaggccaaggcgggtgggttgcttgaggtcaggagatcgagaccagcctggccaacatggcgaaaccctgtctctactaaaaatacaaaaattagccggccgtagcagcgcgcacctgcaatcccagctacccaggaggctgaggcaggagaattgcttgaaccccaggaggtgggggttgcagcaagctgagatcacaccgctgcactccagcctggcagacaagagcaagactccatctcaaaaaaataaaataaataaaaaagaatgattgatgggaggatgacacaagagcctgtgtcctgagctcagcagtgagcgccaggcacagttacctacagtcatcttcatgtcactgtcctgctcacaagaccatcaggtcccctggccctgtcgctccagccaaagccctggctctgcccactagggactgttgccctcattctttcatcagttattcactcatctgcctggtccatcaccgagcagtgctgactctgcaccaggcaccacccaccgcccagtctaactgggcttctcctggaccccaacaccgctgatgtggcagatgctatgacttcaaaacctaaggacccagcttcttgggaggtgaagacagggggattgtttgagaccaggaggttgaggctacagtgagccttgatcatgccactggccctccagcctgggcaacaaagcaagaccccgtctcaaaataataataatatggccaagtgcagtagctcatgcctgtaatcctagcactttgggaggccaatgcgggaggatcgcttgagctcaggagtttgagaccagcctgggcaacatggcaaaaccccatctctaccaaaaaaattagctgggctcagtgttgtacctgtggtcccaactactcgggaggctgaggtgggaggatcactcaagcctgggaggtggaggttgcagtgagctgagattataccattgcacaccactgcac[136 bp omitted]cctggccaacatggtgaaaccccatctctactaaaaatacaaaaattagttgggcatggtggtgtgtgcctgtaatcccagctactccggaggttgaggcaggagaattgcttgaacctgggaggcagaagttgcagtgagccaagatcgtgccactgcactccagcctgggtgatgcagagagactttgtctcaagaaaagaaaagaaactggtttggaaggataacccagactgcggcccggtgtgggtttcactctgagcacttttgggagtgttgagtccacgtgctgttcttgggtaaggagtttacacaatgctgcaacctccccaggtaggctcccccttgcagccaggggacatctcttcctaagattctccaggcttccttgctatttcaggagcttcaccagaatacctcctggggtgttgacattgggccctactggaaccttcctgaatgatcaggcgagctgggcattattacatctgcttcagggatgaggaaaccaaggcccagagagttatgtagtccaagatcctggagctggtcagtggaggagccaggaggggaaccagcttgtctgagcccgggtctgtccacacccttctccatctccatcccagccaccgctcctgcacttgcctcacctccctcaagtgtgagcaccagggccgggccgcttctcatcccagccgccccttcccgctgctcacccacctcatggctgtggatgcggccctccaagtcctccaagggtgtggggcggctcagcggggcccgcgcccaggccagcacctgcctctctatctgtcccaggtctccatccagccgggtcatctgtgtcaggagcttctgggcctgtgggttggccaggtctgagccagatggagctgggggcagaggtgctggtgagggcccagggcctatctccagactgccagataggtgcccccaccaggtgcccacagagggtcctgtcggggtagggtggaggggatgggcagggccaccccagagatgaaatccccagagtgatggtccctaacccaaggcgacccctgcccatcacagaccagtcggaagtcggaatctactccttctagccccacagccacctctccccgggccaccctgggtaccctgctggctgggccgaagagactccacagcactggccttcaggcggctctggactgtggccaatttctgcttcagggcctgcagctctgaggccagcctagaatgaagaggagattgaagaaagaggtccccactctgcctctctccctccccagccccagtagacgcagcttcaggtgaaggccagcctttgagcaggggtctgttgggccatgggcttggacaccgcagggccggcctgctctgcccacagcctgcccctgagtatccctacacagacctaccgggaggccctggccacagcatcagggtctggtgctgggatgcagaagcaggcggcgggagcacgcttggtctccccgccagggccctgcacgacccaggcgtgcgggtcagtgttatctaccagcttataccgctcaccctgcagcagctgcacctgggggcacagaaagggagcagctcctgagggctcaggggcagggggccaaggccagggcagagtaggggctggggacagagacaaatggggacagcagctggaacagggacaagagtagggtgggaggtgctggggtagaaaagaggcaggacaggacttggagagaggagggtctgagtcaagggaaggagtagggcaaaagtgggcgcaggagacagctggggatggagcagggatgggcttgggcaggggcaggggatgggttgggcggggctggatggtggcaggggtgaggtgggggagttcgcacttctcctgagtcccagtcgcagatgctgtccacgtgcaggggctgctgaggggggtttcttcgctgtggcagaggggccacatcccggcttcgccgctgcaggtccccagtggccctctcggtgacggccagccgtttttcctctgcctgccgggggcccaggcagtgggggactcaggccaggctgcattggaggctggccacaccatacctgtccttcaaaaggcctagaggctggccttcatgaaggcaggggtctctaagtcagcaaagtaaaaggagcccctctctgggggacctaggatcctgggatctgctagttgcagggagggggatggcacagcatcacccaggccaccaagcagaagctagacaggcctcagagctctcccaggctgcccttgtcccactgcaaatgaggaaactgacgtccagaagtgggaggagcttgctggtacctggccagcctcctgctagagtaaacccccctgccagcacccaggccagggcttgggataggactaggtaccaaggcagaaggggtgaggcccagaaaaatggacaggaccaattcccagaagtggggtgcagacggcctggtggggttgtctcacctccagctgttgcagcagctctgtgggggcgccaggggggcccccaggtgcagggctgtacttggcatccaagttggagttgagcttcgccagggtctggctgactgagtcggcctcttcctggaactgagttcactgggtggtcaagggcagagcctcgtgcaacctgctgcccactgaccctacaaaccagctgaacctaagccagctaaacacaaagcagctaaacctaaaccagctaaacacaaaccagctaaacacaaaccagataaatgtgaaacagctaaactaaaccagtaaccgctaagccagctaaacctaaaccaactaaacacaaatcagctaaacctaaaccagaaaaacctaagccaggtaaacctaaaccagctaaacttaaaccagctaaatctaaaccagctaaacacaaaccacctaaaccgaaaccagctaaacctaaaccagccaaacacaaaccagataaacctaaaccagctaaacctaaaccagctaaacacaaaccagataaacttaaaccagataaacctaaaccagctaaacctaaaccagctaaacacaaaccagataaacttaaaccagataaacctaaaccagctaaacacaaaccagataaacttaaaccagataaacctaaaccagctaaacttaaaccagctaaacctaaactgtcactctcccctactctggtcggtctttctttttcctacccaggcggcaggaccttttatcactggtgtgctcttgcaaatggggtcttatttgtgcactgaacttaatttttttaagtgggtcataaaacacttggtcttcgtccttcctgcacaaatgaagggcaccgtcacctgcctccctccagcacctgaagtctttcttgctgggacagagggtattggagctgcacttgtcccagccccggagaagaagctgtgctttaaagaagcattccaggtgctttgacggaatttttgtcaacgtgtgtgatcacagtcttgtggttctataggaaaatgtatgaaacattatctgcccccaaatcccagttgcatattatatcagggtttctcaaccgttttttttttcattattattctcctaaagagccttttaagaaatattttatttaatttccccccacctcatccccataaaattttatttatttatttattttgatagagatgtatctatttgtatagagacagggtcttgctatgttgcccaggctggtctggaactactggtgtcaagcaattctcctggctcggcttcccaaagtgctggaattacagatgtgagccaccacacctggcccccacgaaattttaataccacagatatgctgtatacagcttaggtgctgtatgtggatctggacttcatgcataaaaagagttaagatatttttctgccagtaagaaccaattttcacccccctgggaaccgcttcaccctgttgagaatgtgcccatgcctttctttccctctgggaccgagtggcaaccacacagctctattttattttatttttgaggtggagtctctctctgtcacccaggctggagtgcagtggaccaatctcggcccactgcaacctccgcctcctgggttcaagcgattctcctgcctcagcctcctgagtagctcggattacaggcgcgtgccaccacatctggctaattttggtatttttagtagagacagggtttc[132 bp omitted]tctcctgtgggcaggggtgctgtgctcccgcccctgccgcccctgccgcccctgccgcccctgccgcctgcccgagggctcacccggcggtagtcctccacgtgctgcagctgggtctcctggcagatacacaggttcaggaagttctgccactccatcttcagggcctcctggtgggcctgggtacggcagcatggagccctcggaccacgccccccccacgtccgccccacctccccccttccccgcccaccacgtcccttctcactctcgccctgccccagcgcacctggatgggccccaccgcggggtgccgcagctccaccatgcgctcgccgtcgtcctccagctggttcacgctctgctcctggctcagcagctcgtgctgcttgaagtgctgggggcgagtcgggtggggagcggcggtgaggacccggatggccctggccgcccccacctggccccgacctctgccagccgacctcgtactcccgccgcacgcccgcagggtcggccatgaggtcgctccagtcctgctgcaggatgcggcgctgctgctcagccagggcgctcagctgccgcgtgcagccctggaggtgcgtgtacaggctgcccaggctctgcccgcgccacgacgccgccttctgtgctcaggacccgccgccagcagcagggtggggagacagaaagtggggggcaaaaggcgccattgggccgcgctcaggaacactggccccgggcagggtccgggcggccacccaggcccacccgcagcctccctgcccgaccctccctcctgctcaccagtaggtctcggtattggctccggatggtggctgcatcctgcctcgaccaaggggagaaacaagcccgtgagaggtggggtgcagggagacggccccctaagatctgggccagccataccccacccacccctatccccagggcccagccgatctagctccggctctgactggagaaacgggctggggctggccccggatgtgacatcctccaggctcacctaccggccccacgaggctccgcagctgctgcccataggcgtcgatctccttctgcaggatgttgtgctcggcgatctgttgctccagctccgccatgcccggcccgtactggcctgcgcagacctgcttctgcaggagagccggcggctcagtccccaaaggaccgcggtggggagccagagaaccccacacgcctcccacccggagaagtggacttggtcatttgggcagagcgtggacgagcctgggagcagcccgggtgcatgccctgcagctcccccaggggcgaggccattctgcagtggcccctgagtcccactggttcccagacgctgggctcagcctctaagaagtctccagctccatcctgccttgtctgtgacccagcctcagtgcttcctgcctggacaccaccagccaagctctagggccctcagaatgccctgctccagccgggcccttccccactgtccctctattgtcatgatgacaccccttctgtgtggcatcaaagcacaactcctcaaccagggatcagaatgtcccatgacctggctctgcccacctgcccagaaatccccacttcccgtcgaagcccaggcttcctcctggcaggaacctttgctccttctttctggaattgtcctctcctcactacttcaccctggcccaactgagccctctcacccctctgaggtctcttcatgtacctcctcctgcaggaagtcttccctgactgcactgtctactctgctgtctctctgcccagacccctgagccacccctacaccctgactattcaagcctgcagtcaggccctggattaaatgcagttccgtatcgccctctgatcacactggggtgtgactttgagttcctgacctgtttctgctccagcacgcgtgcccagtcgaccctgggtcccacgtcggggggcagcaccatcttctcgtacagggcacggtactccgcacactcctgggtcacccgctcgtgcagctgcttgatgctgtcaagaaggtggccggcaggtcagggctggacctgggtcttccccagggacccccagccctgccgcagctccactcactccttctcaatctcctcagcctgcgggtgcttgagccgccgggccttgtccacgtccaggaagaggtccttgagcagcacctcagcctccttcaggctgcggcccgtctcctgctggtgctgcagggcctggctctgctcactgttcagccggtcctgtgggcaggagatgggcagactggccagggcccagagcccccacacccctgctgcccatcactgtgggcctgagccccaactttgggaccccagctatgctagccaaccttgaggcccacgccaggcacagggtcaggaccagggcgtccgtggggcaggtgacaaggacacaggggagcccagaaaagaaggaagctgagccctctctcccaccgtgtgttaggggatgggcggtgcaggacaaaggtcatctgtcccatcttcaccatcaccaaggggcactcagggagtgccaggcctgatgatgggcctcccatgccacccagcctgtccacgccctgccaactgctgccggggcctcacctgctgcagcctcttctgcgtctccaggatgtcccgctccacctggtcggcgttggcttgcatgcgggagatgagaagggccagctcctgggtggcagccctagtgtgtggaggggacagcgggtagctcggtggaagaggcccctctgtgccccatccaggtggcatcccctgccctccctccaccccatcctgcccccacagcctagctcactgccctgactttggggtctctctctgcagaaggctctgtgagctagtcctggttgggggtgttagcactgccccgccacatgaggggtcaaaaggtgagggtctcaggtttgtgtggtgctggggagggggcaggcggcctcggtgtcccagccttagccagctgtgctggcagtgagttcccgaccccacctagctacctgccacttccctccccgagccagtgaatcaccggctcagccactagcacctgagccagcctggctgggccctgggaggggtagttgggctggctggggcagggaggcagcagcatgtcccccatccccacctcctcgcactccagccctgtgttcccctatacctcctccaccccagggagccttgccagcatgctggcttcagtagccatctagaggagcctcacactgtcggagccggggaggtggggcaggcgcaagagactactgggcaccctaacattctccagagttgagggttcaaagcccagattgggctctgacttgctctgagtcacatggtcaggggtggaggggaaaccttgcttccaccccagggctttttctgtgcattcgccctgcagcctccatagagcacctgctgtgtgcatgcactcactgtgcggaggtcacaaggtcaagcagacctaaaagagggcagattggtccaagccttatgagcacagtgccttatgggggatcattatgctggggcaggagaagccttgaactgggtcaaaggatgggcccccccaggcaaagggacagtgctggtgaaggcacagcagtctggaagaactctgtggccaagacaccctggtttcatctttctccatcagaaagatgatggacttgaccttggtcaagttactcaacctctctgtgcctgaggttcctcacttgtaaagcgggattttaataaaaatatctatgccttagggctattgtgagcattaattgaatttatccatctgaaacgtccagtgcaggcctggtgcagggtcggcacccagcacgtgttagtttttatcccattagagggctagtgccttgaaggcaggggcttgttggttctgtctacagtgacatctccagtgcctagaacagtcctggcatacagtaagtgctcagtaagttcatgtcaaacgagtggatcgcacgtgaggggagagccaacagggccctgaggacggagctgccccaggccaggagcgcactgctggggagcctgcctggacagtgggagctgcaggtgctgggccctgggcgcccctcctcaggtcccgcctcctgggatggctgctcccaccgggagctgcacactccaccctgggtggggctcaggtgccccagggaggacaggtcactcagcgagagtgttagctgagagtcttaaccactgtctttcccgtccgcccagacacccagcctcggtgtctgttggtgccttgatccctatcggggtaatgggcacccccactcccacaccagcctttcatccctgaggtcatctcgacaccctggacccaggcgggctgctgcctcctctgcagacgagctgaagccagtgagtgggaagaacaccgcccaatccatccacagattgctgaggctgggctccagagagccgggtggtccaagggaggcccagtgccccctgcaccacacccactggaaaaggaagccccagctctattttgttttaacagacagggtcttgctctgtcacccaggctagagggcagtggagtgatcacggctcactgcagcctcgacttcccgggctcaagtgatcctctcacctcagcctcccaagtagctctgactacaggcatgcgccactacatccagataatttttgtatattttttgtagagacgggatttcatcatgttgcccaggctggtctcgaactcccgggctcaagtgatctacccgcctcggcctcccaaagttgtaggattgcaggcgtgaggtattgcgccaggattttttttttttttttttttaagacagagtctcagtctgtcacccaggcgggagcgcaggggtgtgatcatggctcactgcagcctcaaactcctgggctcaagcaataggcacgagccaccatgcctggctattttttatttttatttttttacagaaacaagatctccctatgttgtccaggctggtctcgagctcctgggctcaaggaatcctcccgcattggcctcctgaagttcggggattataggcgtgagccacggcgcccggccatgaacccctaactcttcaatacaacaaggccctgggtgagaactctggggagggctgtggcttaggcaggaggcagcacagcccctgcatccctaccccagggatcccaccccgtcccctcagtcctcatgccctgtacccaggctccaggggtcatcccagccaagtagagccttggggcagagctgcagtcaggcagccaggctctcctgtctcccaggctctcctgtctcccaggctctcctgtctcccagcctctggcagaggagggcctccgtgcaggctcctgtccagcacttctcccgcgaagcggcctcaatccgtggccctcaggcccccttagaggatgtagggagccccaggtcatcccctgcctcctgccagggctgaagttcggcctgggcctgcggctcccaaggcagggagagagtccatccctgggccctttggcctcaggacaccaaatgccagcacggggctggtcctgggctctgggccgccgccgccgccaggtggctcaaggacctgggcctggcaccacccccaccccagttccccggctccccatcccccagtcccacttaccggctgtgcctgctgggggagcctttgggggaccccttggcgggggagcccttgggggaccccttcccctgggagcctttgctcagccccttgaacatggtcgtaaaggcaagtgctggctcaggctgggcttggctggcgaaagacggcaggagggcaggtgggaggcagcgggcgtcctcactggctggtcagctaagtctggcgaggtggggcggctgggcactggggaagggagtttctgggaggcccctccttgcaggtgaggcagcgggcgggcggccgggtcccaggcctgacgcgcatgcacccacaacggccacactcatgcctcctcctgcacaaccagtctgggaggaaagggcacagccctgagggcggggccgagcctgcccgactcccacagaaggtttggacttgttacacccacatgcctaggggagcgcagcggcgatcacacccagatagggaaggagttgggccaggacagacagggctggagacagacgtgcacatgcaggtgcaggctcagcggagaggccccagccccggagctcaggattaataaacacctccagccagctcagaggacctgctgccaggcaggcccccacccacagctctcaatcccccaggagaggagggggtgtcctgccagcccagggcctgactctctgttctccactgacatgatggggcagtcaggggacgttcactccagacaactggcacaaggtccattttttttttttttaagagacaaagtctcgctctgtcacccaggctggagtgcaatggcatgatctcggctcactgcaacctctacctcccgggttcaagcgattctcctgcctcagcctcctgagtagctgggattacaggtgcccgtcaccacgcccagaaaatttttgtatttttagcagagaaggggcttcaccatgttggccaggctggtctcgaactcctgacctcaagtgatccacccgcctcggcctcccaaaatgctgggatcacaggcatgagccaccacgcctggccccattttataaagtgtgcacagtgcagcagcaccagggctggcttcaggcgccagtaagcctgggctctggctgaggcccgggagcctgatgcacttggcttttcctacctgcctcttcccccacccagaaatggcccctggtggcttttatgaagtcagattgagtggcagacagtgatgccagcttattggtcttttcctcacactgggtaccagggctgctgccttttccttctgtggtggccctgagcgtcttcaagaaagaggcgatggcacccccctttccaggcgctcatttcactggcccagcgtaacaggccccttctgcggggtggcgtcgctttccaggtcattcctgaaacccccgtggttttagtggaaggagggcttgagggggagccaggggatggaacagactgactgggtgacatcacctggacatcctggcaggcctcgctgaggacaaagcacagcctggcaggagagaaagatcccagcagacgggggagaccagggaccgacgcctgatactggcctcaggcccccatgggatagaaaagtcctgcgccctttttggctgaatttcatgggaagtccctgaactcggccgtggagaggggatgcaggacacccccattcctagaggtggaggagctgacaggggcagtaggggtggggagggcagtggcagcccctgacagcaatgaggaaacaaagaggtctccagtgtccttggctcccagcccgtgtcttgagtgagatggcaccagggatgactggccactcagcctctgccccagcctgctcccactttattcctggtgacacttgtcttctagccactcattgcacacctgcaatcagctgtcttcagaaaggagccgtttgtgtgaatgactacgggggccaacgccagcctcacccctggcctccctgactcgcctttttcttttctttcttttttttttgagactgagtctcgctctgtctcccaggctggagtgcagtggcgccatctcggctcactgcaacccctgcctcccaggttcaagtgattctcctgtctcagcctcccgagtagctgggattacaggcgcccgccaccacgcgcgactaattttttgtatttttagtagagacagggtttcaccacgttggccaggctggtctcgaactcctgacctcaggtgattcgcccacctcagcctcccaaagtgctgggattacaggcatcagccactgagcccgcctgcttcacctttgagcttggcccctccctgggaggtggcagtcattggaagtggggccctggggagaggtgtccagactccagacagagagcagccgggtgaggcccctgagctgtgcagggggaggtgccctgggcggagggcagcgagtctgaggtctggaacactcgagcttcctcccctcttcagaagccctccaggaaggaaatgagcactgcagggggccctcacacgccccggagattaagggctaactgatttactgcaagaaaaacaagagctgacttcctggcgtgatcttctcatgctggatcaaatcaggccccgctcctctgataagggctgccaggcggcaggcaggaacaccctgagtcctgaggcgtcctctcacgtgggatgctcctgtcagatggcagcaaccctggccccagaagaaaacaggagaaaggacagggacacagagtgaggcatggctgtctttgtgcttcacctctggcctcaccctttggagagaaaggagccctttatctaaaaggtcaagatggggctgactgcctgggtcaagaccctcagcgtccgtttctgcaaccacaactcctgctgtgtgtggctgtagcgcatttgaaggtgcccggaccgaagtgagatgtgttatatgtgcaaaattcacaccagatttcaaagacgtactatggaaaaagaatgtaaaacgaccagctgcggtggctcatgcctgtaatcccagcactttggggggccaaggtgggcggatcacgaggtcaggagttcaagaccagcctgaccaacatggtgaaacctcgtctctactaaaaatacaaaaattagctgggcgtagtggcgcgtgcctgtaatcccagctactcgggaggctgaggcagaagaatcacttgaatcttggaggcggagattgcagtgagccgagatcgcgccactgcactccagcataggagacagagcgaaactcgatctaaaaaaaaaaaaaaaaaaagaaaaaaagaatgtaaagcatctcattaatttttctattgattacatattgaaatattttggatatgttgaattaaatgaaatgtatttttagttttagtttttttctttttgagacagagtcttgctctgtcgcccaggctggagtgcagtggcacaatctcggcccactgcaacctccacctcccaggttcaagtgattctcctacttcagcctcccgagtagctgggactacaggcgcgcgccaccacacccggctaatttttgtatttttagtagagatgaggtttcaccatgttggtcaggctgatctcgaactcctgacctcatgatccggggttacaggcatattttaaattttgacctgttgctttttactctttaaaatgtggctactgataaatttaaagtgacaaatgaagcttgcatttggggctcatcaggattccttcagacagctctggcctggaagttagataggatgccccaaccttcaaccctcctaagccctggcttctgccatgtctctttgcttgcagttaaaaaaaactttcttttggcgaggtggggtggctcatgcctgtaatcccagcactttgggaggccaaggcgggcagatcacctgaggtcaggagtttgagaccagcctgaccaacatggagaaaccccgtctctactaaaaatacaaaataacaaaaccaggcatgggcgtggtggcacatgcctgtaatcccagctacttgtgaggctgaggcaggagaattgcttgaacccaggaggtggaggttgcggtgagccgagatcgcgccattgcacaagagcgaaactccacctcaaaaaaaaaaaaaaaaaaaaaaatatatatatatatatatatatatatatatatttttttttttttttttttggccgggcagtggctcacgcttgtaatcccagcactttgggaggccgaggagggcggatcacttgaagtcaggagttcgagaccagcctggccaacatggtgaaaccccatttctactaaaaatacaaaaattagccaggcgttgtggtgggtgcctgtaatcccagctacctgggaggctgaggcagtagaattgcttgaacccagtaggtggaggtgagtcaaaattgcgccactacattccatcctgggtgacgtgggtgacagagtgagacttcgtctcaaaaaaaaaccaaaatcccgtctctactaaaactacaaaaacaaaaaaattagccaggcatcgtggcgggtgcctgtggtcccagctactcgggaggctgaggcaggagaatggcatgaacccaggaggtggagggaggttgcagtgagccgagattgagtcactgcactccagcctggatgacagaagtgagactccatctccaaaaaaaaaaaaaaatgttttttggccaggcatggtggctcatgcttataatcccagcactttgggaggccaaggtgggtggatcacgaggtcaagagttcgagaccatcctgaccaatatggtgaaacctcatctctactaaaaacacaaaaattagctgggcgtggtggcgcacacctgtaatcccagctactcaggaggctgaggcaggagaatcgcttgaacctgggaggtggaagttgcagtgaaccgagatcgcatcactgcactccagcctgggtgacggagcgagactccggctcaaaaaaaaaaaaaaaccaaaaaaaaatttttttaaaggcatgcatgcaaagatagcatctccccaccttgaagggcctggtgagtccttcctctcacctggccctggcttgctccttggtggattgagaggttagagatgaaacgatccctggggctgctcaaccctctgccagccatgactttgcgcggcagcttactcactccttgcgcctggagcgccacgctgatgtgggcagctggcagctcacctggcctgggacctgagcaagaggcttgatcagaccaagaacagtgagactctcggctccaagactgccagacacagctgggcatatgtgcagcccggccacagggtggccacttggcatgtgtgccagcagttaagccctctggtgcccactctctcctccagctccgggctcctgtggggaggcattcttctccctgctgaggcagatggtggtaattgcctcctttgtcccgggagccgtaagctaccaggcgcccatgtgttcctgatgaggcgaggctttgccgtctcaggaaattgccctgtttgtacaaaagctccgctgccagacccttggaccgaagttgagtaatgacctcttcccttcactcccttcgcccactgagcaaagcagaggcaccctcctccagctgggcctagaggagcacagtctggcggactgggggttcaagggaccagcctccttccgttgtctacaggtataggattggcgggtagaggctgtggcccaggaatctgcagggccaccaggaggaggctcttttggctgtgagtctgcctggcaagtccgataaaaagaactgaaatgccaaggtcagcctagagagaagcaaaaggtggtacagcttgcctaaccagacaagagtggggaggaacaggtgctagtgattccttttgggacttttacggggaaggtttagaggaagcaactaccaaaactccaaaaaacagaaaacaaccaaatcttgtgtgtgttaagagagcaggcaggattcctcatactaaatggcaagaaagagaacatagagggaacccctggaatcctcaaaaccaaggctgccttagggtatctgtccctccctctgaaccatcccctttccctgggagaaaggggacccacagcaccagccccagttcagctgtaggactgatgctggtgcagcccactccccagcccctgcagccatctcgtgcatgagccatccctgcattccagaagtctgcagcccagccagtcttactcaggaactggtaggcccaagggctctgggcctctctgccacctttaagataatagctgtccttactagctaggtccggggacctgcagccctattttggagaagtgcggatgtgacggaggcagccagctaactgtccatgccaagataatgacctgcgttgccgcttgagaaaatgtcccaccggctgcaccacagcagcaggggtctggtggcatctggcactgttcactgttcagagggagaaaaaggtttataaaacagacaaacatgaaaacgaaggaacaagaagttctcatagctgcctgatttgtctctattgtcaggaagctggaaaggggaggttaaaccacccagcacagacagcagctagtcagacccaaactattgtctgaatggcattgcatagacttaggaggacttcctgggaaggggaagacaaggacgcaggctggctgagtggaaggctctctcagctatgtgtacccatcgactcagggtacagcagcccacactgtcttggggtctgggctcagaacattttgggggaacctcctcactgtctcctcccagcaactttgagacgcagccgcccctgttgtacaggagctggagtgtgctcagaggcaatggactagtcagtgtggggcagggatccaggagctcggaggaccctgggcacctgctctctctgcctcacacctcttcttaggcagcatgggaggcactgcctggtgaggcctttgcacagccacgtctgtctccattccacagatgagccgcagctaacgttactcagctttcactggcccaggtacctgcccgtcatagctggattgctaggtcagaagatccctggggaagcactttggggggccgaagctgcggatcacctgaggtcaggagttcgagaccagcctatccaacttggtgaaacctcgtctctactaaaaatacaaaaattagctgagcatggtggcacatgcctgtaatcccagctactcaggaggctgaggcaggagaatcacttgaacccgggaggcagaggttgcagtaagctgagatcgtgccattgcactccagtgtgggcaacaagagtgaaacctcatcttggaataataataataataatacttctactggatgcttgtagagcccctcactctgtgccagatggtgctcagagcagagggtggacccagaggccagggcctatctactgtgtgcaacccgcacagcctgccaccccagctggccctgggcggtgcccccagccacagcccctcccaggtcctcctcccaagtgtctctaacatctaacagaataacaggttggattcttccagttggtgttgtcaggatgcaggcaatttccaatttattctctttgctttggaacatcgataaattttacagctaaatctgctttccatctcctctgtagcaacaactgtcttcaaacaaaaaattagaaccaacacatatttttgctatctttggatattttcctagacctctaaatgtcccaggcttttcaaggctgcagacagaattgtgctgtttagaattctgtgatcagttggcttttttgtgtgtgactaacgacacctcgtatgtgaaaaattagcgctgccacagcgatgacagtgaacagagcacagtcccaccctcaaagcccctggcgttggccttcctctcctagagggggtgaagcctctgcctcagcttttgggaggaaagtcctggctctggcccagagccgctatgggttgaggatggcctgtcatcacaggctgtcaccttgtgcttgtggtgacaggctcaggttgccaccaggggaaggggtcggaaccaagcccagcaccgtttcatttcaaagagggaatccaagagttctcactgatttaatgtaaaaccagagaggagacagcaaatccaaacaacattcgggaagagaggaacaggccaggagacccagcagcaaaggccagtgccatcctcagccacctcgtgctcctgaccctcacccagcaggcctggtggggcttgcctggaacagagaatagaaactatgatcacataggccaggcgtggtggctgacgcctgtaatcccagcaccttgggaggctgaggcgggtggatcacgaggtcaggcatttgagaccaacctggccaatagagtaaaaccccatctctactaaaaatacaaaaaattagctaggcgtggtggcgcatgtctgtaatcccagctactcggaaggctgaggcaggagaatcgcttgaatgggaggcggaggttgcagtcagccaagatcacaccactgctctccagcccgggcgacagtgtcagactccatctcaaaaaaagaaaagcccaggtgcggtggctcatgcctgtaatcccagcactttgggaggctgaggcgggtagatcatgaggtcaggagtttgagaccaacctggccaaaatggtgaaatccccatctctactaaaaatacaaaaattagctgggcgtggtggtggccacctgtaatcccagctactcgggaggctgaggcaggagaattgcttgaacctgggaggtggagtgagccgagattacaccactgcactccagcctaggcgacagagcgagactccatctcaaaaaaaaaaaaaaaaaaaaaaaaaaaggacagaaaccacgaccacgaccacatccacagcagacctagggcaggctttaaaagtatgagaccgggccaggcgtggtgactcatgcctgtaatcccagcactttgggaggtcgaggcaggtggatcacttgaggccaggagttcgagaccagcctgcccaacacggtgaaactccgcctctactaaaaatacaaatattagctgggcatgatggcacgcacctgtagtcccagctacttgggagattgaggcaggagaatcgcttgaacctgggaggcggaggctgcagtgagctgagatcgtgccactgcactccagcctgggtgacaagagtgagactgtctctaaataaataaataaataaaagtataaggggactgaatggagctctcttcgtcctctcttgatgttggagacagaagcctcctccagggtcagagcttgctgacagcaccagagtccatcctggaggagggactggagccagcacaacacgggaacacccacttggaacagacccattcgcggcccccggggcctcatctgcatgtcctgccccgtgggaaggcaggactgtgtggcctccgaagtgtctttttgtgaaaacccccagcgaacagcctgcagggcccaggggcagtgagggcctgacttgaaacctgctcccatcagaggcagagccacttcccagggcctgaggacaggagggggtcctgcatctggcgctctgtcccccacgacacagcctgcttaatgtccaggaatcccatgtgaagggatgtgcaagctcgccggagaccttggccctgccagatctgtcttcttatgtaaacacctgcttttaatactaaacagcatcactggccgttaacagccaatgctgctcagagcgcctggcaggagcaccgggaggaatggaatttgtagtgtggccgcgagacaaagcattaggcaacctgagaaggaaaaggtgcagttgggattcgcctccatctctagtttataggtcctgggtccccactgaggccagcactctagagtgggaggggctgggagggctgtgggaaggacaaagggacatcttccaggaggatgagcggttccccatgcccgtccccctcacgatgctgcaggcaacggcctgagactgcagcacagcagggcctgcaattgggttcttggagctggaggacagcgtggctgtcagcacagagacgagacaagggaggtgcagaatcttggcccatggccctgggaggaggatgaggacatggatgaagaccccctaacccccaaatcgtggttcctcagcccgcagggacgctgacctgatcaaaacccaggacctcaacctgagaccagtcatctgtgctatatatatttttcttttaaaaaagtttttttggtagagacaaggtctcaccatgttgcccaggctggtctcgaacttctggcctcaagtgatctgcctgccttggcctctcaaagtgctgggattacaggcgtaagccactgtgtccagcctatctgtgctatattttcagaaggggtgaggatagtcctaaatttatatggcatagatgatgaaactttcaattaaaaaaaaaaaccccagcttcctgaggctctccaacccaaaacaaaccccgggggatcagggcctctctgcgagcatctcaaggttctaagccacaacacaattctaacaagaagcctgatttgtgtctcaccatcctttctagctcttatagccttccctccctgcaacttactgggaaaacaaaaggcacagccaagcccacagtggcattctaaaaccacctttacaaaaattctaacggtgagattattagagtgaaaaaggtctagcctaacccactccatcttgcttctaacctccaagctgtccttgttcattcctgggaataagccgaactcactttgggagaagcttacagtttactgtttaactttgaaacaaagatggtaacagcactttccggaaataaacccccttcttgcctggggcccagactgcctttgtaggactaacgaattagccacaaaaattgaaattatggtttaggagtcatgcagccagaggcccaagattctgaaccttcccagttgctcctagggatgacatcactgttgtaaaacctaagaatggtgctcgagatatttttcagaccctgcactttatggatcagctggcaccatccatccaaactggctcatctggtcttgtagcccccacccaggaaaccgactcagcacaagaggccagcttcaactccctatgacttcatctccaactccctgacttcatctccaactccctatgacttcatctccaacctgaccaatcagcactccccatttcctgaccccctacccaccaaattatccttaaaattcccagtctctgaattttcagggagaccaatgtgagtaataaactccagtctcctgtttagacggctgtgtgtgaactaaactctctattgcaattcctgtttccatgaatcaactccatctgggcagcgggcaagaaccctcggggggttacaatgccatcctgaaacaatgctcttggatttttaaccagtcagccttttcttcaagccactgggtttgctcaaaaacggaaaacatctaagccaacatttcttgtgacgaattttctttcctatgtgacagatgagttttgatttccaaagggaatcgttaagtgtcaggtacatgtttaaatcacttttattccttgctttcttacattgtttttgtgacttctattattgatgttataatagaagtgaaaagggatgactaaggaaaaacggggggtaacgaaggggattaaaatataatggcatctaaaaattacacattgggaagtcctgaaaaatagtgcctctaacatgtgtatctggcatcagcctcacctagttgccggtaagtcaggttacacttgacctcaccggcttcacgcaactaggctcccgaggagagaacggggactggacatgagggagggcatataagaaatgggcacagtctccgtcatctttgccttttaatataagatttggtttcatcatttctgagtgtaacatatttcttctaaaaatagagctctctgcttgtctgaaacttcttagcgttcactgggaggtgaaggggaataaggctgaccgtaattctggggtgacgttgccagtttcatagtcatagataaacttctcaagggctcctggatgctcacagcaaggatgagttcatttcaaatccatggtactgaagaagcatgacaaagcgtttcaaggccccatctgtgcctggtgtggactcctgaacgcattactgaccaaaggcaatcaatcacagctcacagggcaccagacagcagcggcccctttcccaggaggtacaggagacaggatgaccctgcacacatttaccagaagacaacagggtgctctcctgacacgctgcttaagaacgtgtacagacacaagatgtaggaatgcagggccgaagatgttaaactcttgccccgggccaatgcagacctggatttaatatcatggaacttgctgggattttctcacaatacagattaagagtcagaatctcccccgcccccgaggaagagcctggttagctcctgaatccaaagatgcccttgatgtatccagtgaggccactcttggtcttctgttccaacttgtcctcaaggggtgggaaagccacatggttgagggccaggtcaaagaacaaaggcttgcagggaatgggctggaagcctggtgggaagtgcacaaggttggcttgcttggtgacaagggaagggtccaggcagaatgtctcaaaccgttcaaccagaggctggaagtcaaatcaaagagacgtatgtagcatcggtcacagaacacccttggtgaacattcctgagtgccgactgcctggttcagagctttacaggggccatctcactcaatcactcaatcccgacagcctcctacgaggaggggctaccacatccctgccttgtagtcaaagtcactgaaacccagagaggctaagagagtggcaggctaggactggggtgcaggcctgttggccatgttacgagttagagctcttacccacgggtgctactctttacagcaacaggttcctcaaccctcttcccagggatgatctgacatctaggaagctttatgcaagaagctttgaggttgggtaagagaagggagggaggtggggggtttccttagaaatttagggtccactgctctataatgagcatgcattcctagtttgttactaatcctgcttcgtattcctcaaaaaccatggcccagacttaccttattgtccttgacttgggaggaggaggtctctgtttgatgagcgtcgtttgcatctgaaagtttcacagggattcagtaagaacaaggatttataatagcacactaatcacaaatgaggcctatcacacaggtggcccctacatcccaaaagcaaaaggagccagcatgtggggaagccaggcctgtctcctgctgagaagtggtggagataaacagatcaatcccagatccaatgccgtcggcccagtgaagccagcacagttgcatgaggacagtaacagggagaagggccagtgtaacagtgcactcgaaatgcttctacacaatctgatgcccagctggcacaagtaaaggccaggaacatcttacagatgaaccaagacaaccctttcaaccttaaaacagtagtatggggtgtgacagagaaggggagtggcaggaagggaagtctggggatacaaaggccaggcagggggctcaccaaggatggctgcggcctgcagggagcacttctctgaccgcacttgagtgatgagctcttgcacatcaggcaggtcctgtaagattcagaaaacgtgtactcccgagccagggccaggtcagagaagcacaccaagctaacccgagttaaccgaccccactggtattttcacaggactttagactttctaaacggttctcactattagaacaaaacaaaacaaagcaaaacactagcctgtttcaaatgggaaaagctatgccacggcttaagtaataatgcctggaaataaagatgatgttaatattaataaatttatcatacactaaacagtgtgccaggcattgttctaagcaggttacataatcactagcttaaccttctcaataatcctgaggcagtttgcactcccattttacagatgagaaaatggaagcatggagaggttaagcaatgtgccagccatgcgcccaagtggcagcgggctggggtaaagggctgggccatctggctcaagggcataagcccttagtcgttacatcccactgcttcaacgagggtgatgaattttcctggcctcggtctcttgcttggcatattgggaatgacctgagaaggtctggatgccacagaatccttcatgcctccattctgacacttcccccacaaaacaattcagcacatgaaatcaggtccacactggtttgccccgcgtcccaagatgatattccatggtggtgacgctgccatgcctgtcactcccacctgcccacatccctgtgctgttttctagctctgcctttgcttggggtctcttttatttcttctgcatccataggtgggctcctgcatgccagtctgtggctacaacaaaactacaagctctctgaaggcagagagcttcttctctacccctctgagcttgcacgggatccagcagctcctacactggctggcgtgactccatcaacgacaggaacctttgcttgcttttttttttctttttttgagacggagtctcactctgttgccgcccaggggcgtgatcttggctcactgcaagctccgcctcccgcgttcacgccattctcctgcctcagcctcccgagtagctgggaccacaggcgcctgccaccatg[134 bp omitted]gcccggcccctgcttgcttttctaaatggtctctacttgtcaaatatacatggattccttagaccagctgatgttgcaacaagttctataccatcacagcacgccacaagcttaagaagctagttatcgttcaataatcagtaaagcaccgggagtagtggctcacgcctgtaatcctagcactttgggaggctgaggtcagcggatcaagaggcttgatcacttgaagtcaggagtttgaaaccagcctggccaacatggtgaaaccctctactaaaaatacaaaaattagctgggcttggtggcacaagccgagatcgtgccactgcactctagcctaggagacagagactccatcttaaaaaaaaaaaaaaaaaaaagtaaagcaaagaaagccttccatggctgcactttatttatttattttgagatggagtcttgctctgtcactcaggctggagtgcagtggcttgatcttggctcactgcaacctctgcctcccagattcaagtgattctcctgcctcagcttctcaagtagctgggattacaggtgtgcaccaccacacctggctatttttttctatttttgtagagacagagtttcgccatgttgcccaggctggtctcgaactccttacctcaagtgatctgcccacctcagcttcccaaactgctgggattacaggcatgagccactgcatccagccctgtggctgtactttagatcaagcatttccttagctttaacagacccccaaatggcctggggatcttgttaaaatgcagatattggccagcatggtggctcatgcctccaatctcaaggttttgggaggcagaggcaggaggactgcttgaggccaggagttcgaggccatgagttcaaggccagcctgggcaacatagtgagacccccatctctacaaaaaaataaaaattggcctggtatggtggctcatgcctgtagtcccagctactcaggaggctgaggtgggagggtcacttgagcccaggagttcgaggctgcagtgaactatgatggtgctacttgcattccagcctgggtgacagagcgagaccctgtctcaagaaagacagaaagaaagaaaacaagcagaaggttccgggtgggagctgagaggctgcattcctagtgaggccccgccgctgctgctggtcttgcgcatgccctgcaggacagcttcaccagtgcttctcacttggttgcatgtcagaatcactaaggggcctttctaagtcccaatgcccacttcagatccctcacactgattagaaccacaatctctgggggtgcgacccagacatctaccttgaaaaaaatcttcctaagagatttcaacgtgcagtcaagtctgagagcagtacttcaggttttcctgtggtggtttttgtttcttttaaatcagaaaaatgccttcccttcttcatacctaaatcctcctcaggcctggagcacagccatgagtgacacagcctgcagctcctgggcagtcagggctacaccaggtcccacgggcagccagggaggaccagcctgaggtggcgcccagctgttgtaccctcacagctcctccacagctgactccataacctgccagggcttgcaaacaaggagaggccaacctctcacctttaggctgttcttgaaggcgccagcatcagaatttacttcatttgcatatttcaggactctgtcatacaggacaagggcttcgctccacttcttcaccagcacataggactgagcaatgaaaaaacacctgatggggagggaaaagagccacaatattctaaagcagcaattacccaagaccaaggctttccttgcagtttaggcgaaatttcacatttggaaacaggtttcttaacgtgggatcaccgcatgggagcccccttcatgggaagtgttcagatttgtaggctaccctgcagagatgcttcccagcaatcagagatgcccaggtaggcccaacactgagccacggttttttactgactggctgactctgcagaggaggaacagttcccaaaaggagcatggtgaggctggggacaggaaggaaggaagaacgctgcccggctcaaatagaaatcccaaacccatccacacacccaagtcgcaatcattcatctctgctcatcgctttccaaaaacaaaactcacagaaggttcttcctgagtcaaattcctctcctgggctcagcagagcctgagcgctgctggtccctgacaggacagaaggggccatggagtgaagacggggcatgctggagcaccagagcacactggcatgtgagggccacaagaggaagggcaagaatgcatggggctctgccttccatcctggctgggccccatcgtgctacccagcccacttccaagttacaaatgacacaagtcatttaagaaactgagtttagctttatcccaagtcagttcaagttccttgaactggccacactggttctgctaattaacaccctttcaaggcgtgccccttttcccctggaagggaggaggaaagtacaggaagacaagtgtttttgttttttttgagatggagtttcgctcttgtctcccaggctggagtgcaatggtgcgatcttggctcaccgccaagttgcggtgagcctcccgggttcaagcgattctcctgcctcaggctcccaaggagctgggtttacaggcatgcaccaccatgcctggctaattttgtatttttaatagagacggagtttctccatgttggtcaggctggtctcgaactcccgacctcaggtgatccacctgcctcagcctcccaaagttctgggatgacaagtgtgagccaccgcgcccagcgaggaagccaagtttaacgtgtgtgctccactcctccgacctggccaaaaggcagacatcatcactggccactactgaccacagcctttagaaactccccttgaacatgctgggctgaccttcctctgatcacaggcaaggtaaccatacactcaaggccaacggtcccatctgctgtgggctgggtcatgctcccaatgcttatagaacctgggaggcggaggaaaactgcccatcccatgggacgttacctgtaagctttgaacaccagagtcttgaggcctatctctttctggaaggctttgtcttcctctaaaccaggaagctggagcaattccaccagattctgtacaacagatgcaacaagaaaattcatgaagagtagatcttaggttgaatttttgacagaagaccttgtaagaacggacaagagtgaggaaaaaaaaaagcccgaggtcaatacgatggggaaaagcctgtgaagagattgggcagcagccacacctgctgtcacctccactcccctctgatcttggaaacatatttgccctttacaactcaactcagctcacccaccttcagagacttcttggcccatcttagctggaagggatctgttccagcgctgagcttttattttgcttagcatctactcagatgccttgactgtgtgtgtctcacagtcctactgactgacaaactccctgggggccgagatggcatggactcaggtctcagatgctctatggcacctgggagcgtcttacacaggtcaagtgctcagtgatgatctggggtcactattctctgcagatcagcatgtctgagaggtaggggctcacagactgcagaactggtgtaagatctttgtctcttcccagctactaataggtcctgcttgtcacagcccttccgtgatacaaagttaagtcactttgtgtccgacacaggcaaaggaaaaccacaggcccttgccttcccggtcctcaagggtcacctgtaagatgatgtcatagagtcggatcaggtcctggggccggggtgagcgcttgctgtcatcctctggctgctgctgcagcagagccctctgcagacctttggccatgttctcattacgcttgattgccgttgatagcttgatgtaagtcaggtagctggaatgcaccacaagtcagctcaagttatactcagagaagcggaggaactgggaggactggactacaagttggggctgacccagaggaagcagggggcgggtgggggcgtggccacagcagggccatttggcttgggcttcaagggaccctccatttggctactatccagtggcaagtttgcaggggacccgcatgagatcttatcacaaaatttgatttttagcttgatttataccttctgcatcctttttcaagaaccacacagtggaaaaaaaaaaaaaaaaaaacaaaaaacagagagtgggatcccagcaactcacgaggcaggagatcacctgagcctgggtattcaaggcagcagtgagctacgatcacaccactgcactccagcccgagtaatagagcaaaaccttgactctaaaaattgaaaacaacaacaacaacaaaacaaaaaaaacggggggccaggggcagtggctcccatctgtaatcccagcactgtaggaggccgaggcgggcggatcatgaggtcaggagattgagaccatcctggctaacacagtgaaaccccgtctctattaaaaatacaaaaaattagctgggcatggtggtgggcacctgtagtcccagctacttgggaggctgagg[139 bp omitted]ctggtcccagctactcaggaggctgaggtgggaggatcacctgagcccgggaggcaaaggttgcagttagctctaggagtggaaggaaatgaggcaagggccgcagggagcttcaaacactggttgtgttctcgtttttgttttgagaatcttgagtcagggctgtctcaggctggaatgcagtgacatgaccatgatcatggctgaccgcagccttgacctccctgggctcaggggatcctcccacctgagcctctggagtatctgagaccacaggtgtgcaccatcacacccagctaattcaaactcttgggctcaagcaatccatttgcctcagcctcccaaagtattgggattacaggcgtgagccaccatgcctggctgtgttctagttaagctatataaaaatcttaaattaggcatattaaaataaaatgtaaatgtagcatatatacttatttgataaaatggacatacatgcattagcatttgtatgcattaagaaattataaatgtaagccaggtgcagtggttcacgcctataatccccgcactgtgggaggctgagatgggcagattgcttgagtccaggagtttgagaccagcccaggtaacatggcaaaatcccatctctacaaaacaaatacaaaaattagctggatgtagtggtgcatgcctgtagtcccagctactcagtgggaggctgaggttagaggattgattgagcccaggccattgaggctgcagtgagctgagatcacatcactgcactccagcctgagtgacagagctagatcctgtctcaaaaaaaaaaacaaagaaaagaaattataaatgtaaatatacataaatattacatatactcttttgttcaaatattttaataatattaaaaagtaaaaaaattaaaataacccttacctatgcaagtattgaagattagacaccttccctggctctccttcaaggatataatctctctgtttctgcagaaagtgaaaaaggtaaaaagtaaagcaactgatgctctccatcgctctgaccacctcatggaatggtggggtctccaaagtgccctgaacatagacacaaactctagtaagacaggagtcctcaaatatcaaagatctatacttgacataatctagaatgacagtggcactcaagttgccactggcatctaaaaattgacctcaaataagagaactgagagtaacggccagatgagacttcctgtccactcctccccgtgcctaaccccaaagcattaaaatcagacattccacagtccacggctctgtgtgaaggtctgtgccacagatcccagttccaccccttgtgctgtcagagtgtgccttttgtggctggccgaataacatacgccagagctgtctatatgctagcctccgtgcaatctgggaagatgttaccatatatggtaaaagagactctacagatgtgattaaattagggatctctgaattatctgggtgggtccaatgtcatcccagggtcctgagaagagggaggcagatgggtcagagatgcagaagatgaaggaacggaagcagaggggagaggagctgatcgctttgaagcacaaacggagagccacaagccaaggactacaggcagccgctagaagccaggagatgcattcttgggaatactggaaaaggattcccctagggtttctaaaggaacacagccctgtgaacccactagatttctgacctcgagaagcgtaagataatacatttggatcatcttaaaccatcaagtttgtggttaatatgatcgcagcaacaggaaatgaatgcgcctttgcggcatcacattccttacattctgtgaggtgtctcccaactgctatgcattcaaggtgaatgacagtgacaggggctgggactctgtaggcacctctgttaagtcgatgaagggaagcacaatacataaaggcagcctaacggggcaaggaagcaggtgactccttagagaaagcagtgattcaaaacaaagtttatactcaaggctttgtggcagatgctgaaaaaaaaatagttgctaggcaacgaagttattgttgtttaatgggttcagcgtttcagttttacaaaatgcagagagttctggagatggactgttggtgatggttgtacgttatgaatgcatttaattaccactgaaccatacacttaaaaatggttaaggttttatgtttaacgttttttaccacaataaagtttttatgaagaggtaatacttaattaactatcaaagcttatagctgcaagtatcagatatttagaaactgcagagatctctgtgggctaggatggtgcaggcatatgcttttcagaaatggtaagctatgagctggaccttgaaaaacagatggggtttggacaggtgaagaggggcaggaaagattacccaagtgtgcggagggaggggaatgagaacagtgtaacacacggggtgggaaaggcattactgagatgccagtaagtggaacagcttgaggcagaggactcagaaggatgcagtgaagtacaaggctgggaacagactaaggaaggcttgtacaccagctcaagtctgaactgagaggccagtggtctctaagtagggcgcataaaacccagggagtctgggtatgaaacgaaaattagaatttctatttctatttatctcattcaaaaaagcccttattttaatgcagtttatatatgacaaattagtcaaataataagctatataattcataaataaatgcatcagtggtgcaggctcaatgctgcctatggggtttatcagcataaaagtttggaggccattgctcaatccctagaggaaatcactgggctttttaaaattagacagggaaactagatttagaaagattccatttgtactttgcgaaagaaaggcctggagaagggaaccgagaccaagccagaagaagcaattaggagacctttgcggttgcctaggcacacgagaaaaggctaatagaaacaggtgaagcaacaataggcaagaggccctgcaaagggagaagaaggtgggtttggtgacagggacaaaagagacaaatagatctgaggttttcagcctagatgcctgaatcaaccacagggatagtgttttcagaaaagggaggcactggagaagtccacctggagacagaattggaggccacaggcttcacaggccatataggaaaccattaggaggaacaggggagggagaaattaatttctcaatgtgatggagcccagaggcccttgtttgctcccttacgacctcacctcaaaaaaacaaaaacgaaacagtggccaagcgagcagtgcactcagagcactggggtccacctgagaaggggacacaggctgacctggacccgcccagagcaagaaccagggctcggctgagggtcctacctgatctggcttgagctcctcccgaaccacctggatggcgtcccgacactcgctgagcattgattcaaacaggcgctccttagtttcttcgctttcagcctaaacaagggcagatcaaagtaagagactttcctttgagcaaaccatagtcacctaatgggagaggagcaaaatcgcacatggagtcccccaaccacacactcactcacgcacgccacaccagatatcattttaattgttactgttctctaccatataatggtttctcatagccttagtcattcattattcatatggaaaggggagttctatttttaaaagcaaacatgctgaaaaagctgtctgcataactgatctgagacttagcaaaggctttacgtctcttcccagcacagcttcctgctacttccctgcagcgcttcaccctctgctcaggacctggcaccccttgaggggccttacagactggacttgggacactctacactgaagcacagcacaccagaactttccttatcttttccttccagaacaaacttgtcaagctctactgtatgccaacacaattaccttttacaaatgtgacccaactcaaagattgtttcttttaggtacaaggaaataataaaaaagactaatcaatacccaccaaaaagacagttctcctaaatatcacactaagttcttttcgccacagacgtgctgcactcagatattccacatgactactctgagaacaatttttaggacatacaaggttgacacgcatgagacgacagtctttgcacaagtactgggtgtcacctgtctgctacacagctagggtaagtgagaaagtgattcactaactgaatacctgccaagccacattatcgtcccaaagaatctgaccgagcagatagaaatggacaaaaggcagaaaggggatgaacctgtgtgactggcagacccactgtgaaattaaaacatcaacattccattatggtatttgacttcccatagaaattaacactcaatctgaaaaaatgtgttaatattcaactgacctctaagaaagctcaaacgaaaacccagtgctgcccacccctttaagagatggttgggggaacaggggcttaaagaaaaaccctttttcttctcttaagaaagcttttcttaaaagttctcttaagaatctatttcttctcttttcttagtctccagtgtgaaaaaaaaaatcttccttgtaacttacccaatacaaatcaaacatacttttccacttataagttacttgactttcctgttgttcactaacttgggaacgaactggggctcattcatgctataaatctagtaaagcaaacacggccaccattcactcctggaaccaccagagcagcaccatccaatagaactctctgccacgggcaatgtcctctacgtgcaccgtccaatgaacacctgagcactcggaagttttattaatttatctatctttttattattttatgtttttgagacagagtcttgctctgctacccaggctggagtatagtgccgtgatctcgtctcactgtaacc[133 bp omitted]acctgtcttggcctcccaaagtgctggggttacaggcaggagccacagagcctggctggaagttttattaatttaaatttcaataaccacatgtgttgagcggctactgcactggacagtgcagcactggagcacatgctttatagaatattgttggccgaccccaggttggcaagattctttagaatcacttcgtcaaccttactggcctaatttttcaaagtacaaatctgtggaatggtgccgccatataatactcagcaactggaataagatacataagtctagagtgcttaaaaactcgagtaagacatgtgaatggcagggggtgggaggcaaggggagggaaagtattag[360 bp omitted]taggtgcagcaaaccaccatggcacatatatacctatataacaaacctgcatgttctgcacatgtatcccagaacttaaaaaaaaaaaaaaaaagac[139 bp omitted]catgacaaaaccccatgtctacaaaaaatgcaaaaaaaattagccaggtgtggtggtgcatgcctgtggtcccagctattccaggaggcaaaggtgggaggaccaactgagaccaggaggtggaggttgcagtgagctgagattgtgccactgcactttggcctgggtgacagggtgagaccctgtctcaaaaaaaaaaaaaaaaaaaagaaacacacatataccacagccacattctcagcagaaaggaagagctacggcgcccgttttaattccatgcaatccaacaaacatgccaacacccttctcagacaagtggggttaagtggttggagcaaccggcgttcaagaaaagagcgaacttcgtcttaccagctacacaggatttgcctcttttcctgtcggtagggtacagttcaagtttaaaacctcttgactgccacgtatcacctctgctccctttaactaagcctctgcatcaaggtgctgaaaccaaaaaacctccccactgctcccacaaagctctaagttcccactgggaattttacaaacatcctaaaaagcaatgaaggaaaaagtcgatttgaagggcgggacttaagtcagttgtgtttttcttacgacgcccacactgcaatgactcagaccactaatctctgaaggagaagctctcatgattctccctgggcagggcaaaatgtctccaaacaggaagccttcaatatattttgctatttacacttttattctataaatctatattcaaggctaagatgattcctgaaaggacagtggaataagaaactcctctcaacacgcagaggcaggattcctggccacctgtacaccgaccttctccgccagccactggaccaaccagaacgtgctcttaaacataagtggcaaaactccctgcacaaaaattggtggtctgactagaccttttcccaggtgtgcctatgacagtgagaaatcttaagcccagaagtaatatgttactgattagtccaaatgaatcaatcaatcctaggtcagcttttacaaaacttgaaaccttcaggatgggcttttctgcagtctcaggttctctcgtcaggctcagtttcaaaactgactggtgcggaggaaagcgagctgcagtgtgtcctgaggtacagacctcccgctttaaaaagcacattctcagattgttttcacttgtctatggaaattgctggaaggtggtagtatgactaagagacacacaaggcaagtctgaccacattcccaaccacacccctactatggggacaagaatcaaaccttacccagcccagtgaggtttaggaaaaaaatacatggaaatctggtaaagaaggaaacaaatctcacttgagaatatacatgaatatatataaatatacattgttttttaagaaaaagataaatggtccctcttccactcaaatattaaa[150 bp omitted]ggcatggtggtatgcgcctgtaatcccagctacttgggaggctgaggcaggagaatcacttgaacccgggacacggaggttgcagtgagctgagatcacaccattgcacaacgcgttaataaaaacaggatacagaactgtatcttagtataattccagcaagggaaaaaaaaacataagaactctcatgaatataaaaaacattaaaaagaaacagtgctttcctttcagtatgatgtcatatcaatgaaggcatataggaagtgagacaataggctgatctttttttttttgagacaaagtctcgctcttatcccccaggctggagtgcaatggcgcaatctcggctcactgcaacctccgcctcccgggtttaagtgattctcctgcctcagcctcccgagtagctgggattacagacgtctaccaccacacccggctaattttttttttgtacttttagtagagatggggtttcaccatgttggccaggctggtctcatttcgaactcctgatctcaggtaatccgccagccttggcctcccaaagtgctggaattacaggcgtgagccaccgcacccggcctaggctgatcttttaaaaattaaattaaatttcaatagttttgggggaacaggtggtttctggttacatggataagttcttctatggtgatttctgagactctggtgcacctgtcacccaagcagtgtacacggtacccaatgtgtagtcttttatctctcactccctcccaccctttccaggctgatcttcttaaaacatcatgtgggcccggtgcagtggctgatgcctgtaattccagcactttgggaggctgaggcgggtggatcacgagggcaggagtttgagaccatcctggctaacatggtgaaaccccgtctctactaaaaataaaaaaattagccgggtgtgatggtgggtgcctgtagtcccagctactctggaggctgaggcaggagaatggcgtgaacctgggaggtggagcttgcagtgagcagagattgcaccgctgcactccagcctgggtgacagagagagactctgtctttaaaaaaaaaaaaaatgtgtatttaaactttaagttattaacttttttttcttctttttttttttttttttttggagacagagttgcacagttacccaggctgcagcatagtggtgtgatttcagctcactgcagcctcaagctcccgggctcaagtgatcctcttgcctcagcctccaagtagctgggactacaggtgcacgccaccacgcccagctaaattttttggtacttttttttgtagagatggggtttcaccatgatgcccaggctggtctccaactcctgagctcaagtgatctgccttcctccgcttctcaaagcactaggattatagccatgagccaccgtgccagcagtaacttttcaaaattacttaataaatgctagcttttcctgttcttcatttggtacgtgtctgtagccccactctgaaagagccctcatttaacttgcccctatggatctctctcccccaactcctcttcaagtcagaattcctgccccactgtctctgctgtctggcactgaactgaggacagaagtagtttctttcttccagcattgatcacttttaaaaccaaagcactaacccaatcacataatctgaatagttgctaccagagccgttgtccagtggaggtagcaccatacaacagtgccaatagaatgctctcaaaaaaagttccttagcctttcagtttaagcaaaaattaactttctagtactgttctagtcttctgtcctttaagcaaataaaagggatatgagacaggcaatacgaaacacagacaaggacacacatcaactcttcagctgttgaaggctgcctccaacccatagtagccattctggagcaagttgctgaaattttagatgcttaagccaattcctcaacacattaacaaaacaccaccccaccaacccatacacaaattattcagggtgcaaaagataactgtgaggtcttcggaaatgccactgttccctgatgaggcagtagactgtcagcagcctgtttttttaaagatgtcctttaactcatgtggaaaagaagctctaaaaagtgcccccatcactgtctatgtcatacaaaggtcaccaggatgtcttatcttttaggacgcatttggttgtttgtacccaccaataggtaactatgtcagtaggcagtatcaagtgataacagttttgcatgaatattacatgtacaccgcacacaaaacaagacattctggtttaaccaggctatcctgcaaagccccaggactaagaggtgaaccctttagggctaggaggttacgacaacatgtcagagaaacttcagagacataatagttaagctgctgcaccacctgctgggccaaatgtgaccccttactttaagccagcctctaatgcctcccatttttatgttgatgactgttgctgtcaatttctttgccctctaaacattaagaattcctctataaactcagttttcaaaataattttattcaataaggcacatctccgtacttaccaaatccaaaacagcattaaaagtttgttttatgagaactgaataccaacgagccactacatcttaaacacacaggacaaccttcagacacatacagaagacagcacagtaagttcttcctcctcacctggacaatagctgcttcgttatcagccagtcctaataagaaaatgcgcactttgtcaatcttcactggaaccgttctccctctccactccacttcactcatggtagctgcctgtttggctcgagtctgagtgatcaaagcctgaaaaatagtttaaaaaagttaaagctttaactggggatatgagtgatggaggtgaaaataagtggaatctatcatttgtctctttgtataaccaacatattatactccatagaaagtagagtatacaccaatttctttcattttttttgagacagtcttgctctgtcacccaggctggagtgcagtggcgctatctaggctcactgcaacctctgcttcccaggttcaaggaattcttgtgccttagcctcctgagaagctagaactacaggcacatgccaccatgcccgactaatttttgtatttttagtagagacgaggtttcaccacgttggccagactggtctcaaactcctggcctcaagtgatccacttgcctcagcctcccaaagtgctgggattacaagcatgagccactgtgccaggcctctttaatttttttagtagacagggtcttgctctgttgcccaggctggagtgcagtggcctaatgacagcttactgcaacctccaactcctgggctcaagtgatccttttgcctcagcctctcgagcagctaggactacaggtatgtgtcaccatgcctggctaatttaagaaaaaaaaaaattttttttttttttgagacggagttttgctcttgttgcccaggctggaatgcaatggtatgagctcagcttactgcaacctccacctcccaagtagctgggattagaggcctgcaccaccacatccagctaattttgtatttttagtacagacggggtttctccgtgttggtcagactggtctcgaactcctgacctcaggtgatccattcaccttggcctcccaaagtgctgggattacagacataagccactgtgcccagcctctgaaaaaaattttttttgtagaggtggggtctcactgtgttgccccggctggtcttgaactcctgggctcgagttatcctttcacctcagcctcccacagtgccaggattacaggtgtgaaccaccctgctggccaccaatttctatttgttttaaatttctccctggtatcatatattttagctacagaaattcaaatattaaaaggacatagcggaaggttaaaaagagtaacactaagttttggtaaggatgtaaggagaaaagcatatctgtatacgctacaagcaggaatgctaatcagtagaaacttaaagacatttgtcagtatgtatcaagtttccaaaccatttaattccagttttaggaatttatcctaaggaaataatcaagaatgtgtgcaaaatctgaggacatggacattcatggtaatactgtttaccacttaatgaacaatgaatggttaaataaaacagacttctatgcaacggagtaccatgcagccatcaaaggatgatggtgtatggctggataaggtggatcatgcctgtgatcccctgtgatcccagcactttgggaggctaaggcgaacagattgcttgagcgcaggagttcgagaatgagaccagcctgggaaacacagtgagactctgtctctaccaaaaaacaaaaaaaagttagctaggagtggtaaccttcacctgtagttccagctactcaggaggctgaggcaggaggatcacttgagagcaggaaatcaaggcagcagtgagtcaaaatcaagctactgcactctggcctgggcaaaagagacgctgttcaaaaaaataataataagtaagccgggcgcggtggctcacgcctatactcccagcactctgggaggcagaggcaggtggatcacgaggttaggagattgagactatcctggccaacatggtgaaaccccgtctctactaaaatacaaaaattagccgggcgtggtggcgggcgcctgtaatcccagctacttgggaggttgaggcaggggaatcgcttgaacctgggaggtggaggttgcagtgagccaagattgcaccattgcactccagcctggcgatagagcaagactccgactctaaataaataaataaatatggcaaccatgtggtttatatttttccctgatcttttgtatttcttgctttttctatattacttgcttagaaaataaatgtaatgaggttaaacaattgaatacttggccgagaacagtggctcatgcctgtaatcccagaacgctgggaggccgaggcgggcagatcacttgcagtgagctgagatcacgccactgcactttagcctgagcgacagagtaagactgtctcaaaaaaaaaaaaaaaaaaagaatacttcaagtgttaactgcaaaaagttttttgggccgggcgcggt[132 bp omitted]ggtggcaggcggctgtagtcccagctacttgggaggctgaggcaggagaatgtcgtgaacctgggaggtggagcttgcagtaagccgagatcgtgccaccgcactccagcctgggtgacagagcgagactccatctcaaaaaaaaaaaaaaaaaaaaaaaaagaaaaagttttttgttcaaacttttagcaaatgtagatatttgctaatacagatataaatatccatatattaatatcaaatatccctaggggattatgaattactccttctggactttgtccaaagacttttcacaaaaatgtacatactagattacctccaatttttcagccaagagaccctcagtgcccccagacctcaatctcatctgcatgagttcattgatggctgactggtcccctaagagagaaagacaggaaaatcttcaagggtctggtctgttttcttgagaatcactagattcaactcagacttaaagagctcttccccctccacatgctacttcaatgaatctgcagcacaatctgttctctgaagacaagtcttttataaagaatgaaattgactggggcaatgaaaatactccatatggtatataatggtaaatacacatcatgaaacatttgtccaaacccatagaatgtacaacatcaagcgtgaaccctgatgtaaactatggactttgggagatgatggtgtgtctataaagggccatcaattgtaacaaatgcacccctctggtgggggaagatgctaatgagagaggctatggatgtggggaggtggggttacatggatctctgtatctttctctcagccttgctgtgaacctaaaactgctctaaaacagtaaaaaatgaactcagccggagactcaagactgctcttcgggggtacacagcacagcaggacagacacagaagcagaaccgtcttctataattttgggcagggctggcttcaacagttctgcttttgccatcaaccaaaactcaggtcaatgatggaggcaagcgaagaagaaagttacatcaactctctaggctctctgaagtgagctcccaataggccatctatcaatgttcaagttgagtataatgccttgatccctgctctcaccaatattatatgcacaatagcggatgttgggtgaaatctcttccacacgttggttatacagcacagcctgctcctctgtgaaagcactggctagcttctcatagatagttctgcgagaaaagaaaagccaggttttacatcagccttatataagaaaaactcatggggaacacagtgactaaaaacaaattatggccttttgaagctctcctaccaactaccataactggcatgttctaaggttgaaagagaatcatcaacatttctataggaaagaaaagtcaccctcactttcacagaaacaatccactatctgatctgcagcttaaatttgacaatctgtaattaaaactggccacagcctttggactataggacttacttgcatttgttaaaagcctcaatggcagctttccattcttgatgttcaaaacgtagcattcctgagaggtaagctgtgtaagcctgtgaggagatggaagaggaggaactgcttcaacagcaaaccagtgctcccactcaatcttcctttattggcttctaactttgatatcaagaatatggatatgggccaggtgcagtggctcacacctgtaatcccagcactttgggaggcccaggtgggaggatcacttgaacccacagttgaagacaagccagggcaatatagcaagaccctgcctctacaaaaaaatttaaaaataagaataaattttaaaaaaagaagaaaaaaaagaacatggatatgggctgggcatggggctcacacctgtaatcctagcaatttgggaggccgaggcaggagggttacttgagctcaagagttcaagatcggcctgggcaacacagcaagatctcatctctaccaaaaattaaaaaaaaattacccgggtgtggccaggcgcagtggctcatgcctgtaatcccaacactgggaggccgaggtgaacggatcacctgaggtcaggagttggggaccagcctggccaacatggtgaaaacctgtctctactaaaaatacaaaaaaattagctggacatggcggcaggcgcctgtaatcccagctactcgggaggctgaggcaggagaattgcttgaaactgggaggcagaggttgcaatgggctgagactgcaccactgcattccaatctgggcgacagagtgagactctgtctcagaaaaaaaaaaaaaaaaatttagccaggtgtggtggtgtgcacctctagtcccaactactcaggaggccatggcaggaggactgcatgagcccaggagttcatgactgcagcgagccatgactgtgcactccagcttgggacacagtgagactctctttctaaaaaacaaacaaaaaacccaaacaaagaatatggagatatatatatataatatatatataatatacattatatattatataatatacattatatattatataatatacattatatattatataatatacattatataatatataatatacattatatattatataatatataatatacattatatattatataatatacattatatattatataatatacattatataatatataatatacattatatattgtatattatacaatatattatatttattttatatatatatatatatatatatatatatatatataaaatatatatatatattttttttgagatggagtcttgctctgtcccccaggctggagcgcagtggcacaatctcagctcactgcaagctccgcctcccgggttcacaccattctcctgcctctgcctcctgagtagctgggactacaggtgtccgccactacgcccagctaattttttgtatttttagtagagatggggtttcacc[138 bp omitted]agaaatacgtatttaaccaataaaatgtgatacataggcaatttattatgatttattcacttcccaggaaagaacttcaaaagaaggaaatttgttttctgcattttacttaaccattttctgagctataacataagcatcagaagttgaataaaaccttgcaatatctaccatctcttttttaaaaaactcacttccaaaaaaaagtttactttgtgaactttccaggtacaagattgtaagctttcatctatatatcaaaacatgacctttcttaaaaagttacagctagatggccacgtgcagtggctcacgcttgcaatcccagcactttgggaggtcaaggcaggtgggtggatcacgaggtcaggagctcgggaccagcctggccaacacagtgaaaccctgtctctactaaaaataaaaaaattagccaggcgtggtggcacgtgcctataatcccacctactcgggaggctgaggcaggagaattgcttgaacctgacaggcagacgttgcagtgagctgagaacgcgccactgcactccagcctgggcgacaaagcaagactctgtctgaaaaaaaaaaaaaaaaaagttacagctagttataaaaaaccaagagcttgggaatactcattctattttatggaatgaagcgttgcccaattttaaaaaaaggataaaaaaaatcaagagctgataaacaaaacatgctaacttctcctcttaaaagcaagttcggaaagtttttttcctcttctgactgtcactttctaacactaagaaactctgttctgtttaactgcagctttttaaaatgtctttaatctccacaataaacaagctgaatgttgaggtactaacctgagcctctaatttggtcttggcatccacgcgattgctctcacacaagcgttccaattcctctgcatgcttcacggctttgcgtaggcgagataacaagtgaaaccgttttcggggttcagtgttggcttcctgtttcagctgcatggcgtagctccaggctctttcagcatccatcagaaccagaagcaagtatctagaccagagacagaagtggggagacaataaaggccatcaacagacccagatattctctgaggtgtaatcttcggcttctcggcttttctttatactctcccgcctttgccactctcaaaacaactcttctgatattctcagccatgactctaaaccagtatctctattcctaacctgggctcaatctcaggtttctcatcatctactagacacatctcattgaaaagcctctaccacctcaaacacggtaaatccagaatcatgacctacccctcctgaatgttgtcaaacagacacggtctaggcacacgatctggcctcatttttgaatcaacacttccttcatctcaatccagttagaaaagtccttaagaggcagtatattgcctaggtgcggtggttcacacctataatcccagcactttgggaggctgagccaggcatatcacctgaggtcaggagttcgagatcagcctggccaacatggtgaaaccccatctctactaaaaatacaaaaattagctgggtgtgttggtatgcgcctgtaatcccagctacttgggaggctgaggcaggagtatctcttgaaccgaggaggcggaggttgcagtgagctgagatcacgccactatactctcgtttgggcaacagggcaagactccatctcaaaaaaaaaaaaaaaaaaaagaggcagtatattaaagtggtgataaacaagagctccagagcccgggacagaatcccagtgccaccgcttactagctgtgtgactgtgggcaaagtactaacctttctgcgcaccgctctcccatgtagtaatacaaataacacatttagaccagaacctggcacttactaagtgctcagtaaggtcgttaactactttattattatactggtgaatctttctttactgccttgatcaatctgtcttaaacttcagcttaaccttgtctcttcagagtaaaggatcttgctatcataagatagtccaggctcggtgtagtggctcatgtctgtaatcccagtacactgggaggctgaggtgggaggatcacttgaggccaggagtttgaaaccagcctggtcagcacagcgagatcccatctttacaaaagaaaaaaagagaaaagttagctgggcatggtggtacatgcctatagtcccagctactcaggagggtgagacaggagttgttcaaggctgcagtaagctatgatcccactgctacactccagcctgggtgacagtgagaccctgtctcaaaaaaaaaaaaaaaaaaaaaagggagagtccagatttctcccaactggttctcatgagatttaatcactacatcctgctgcatcctattatggtctccaggctctagctttctgactgtacacaccaagctcacaaccttttcactgcctgagtagcagctaacaagtgtccagagctttacagttcctagactgcatgcacggataccagggcatgctgcttcccccgacacagaatgttcttcactctcacaaatccttcaaggtcaagcctcctctgtgtgggcttactgacttccctgtcaaaagccttcaagctcaagtctcctttccaaggctttagaatgctgaacagtaaatgatatacaacattgcacttttactgtagcattccctggtttgcactgaccaacattttccaataagatgaaagtcaatgaggttcaaggaccatgcctcctctccttctatatctagtgtgtcacaactactctgctgatgtagcacaaagcagctctaaacaatacctatgtgaatgggcgtggctgggttccaataaaacttcatttacacaaaaggtggcagcagcgtaatttggcccgtaactgtgaggaagacccgggggccttgactacatgttgcctgacagactaaaaattcttcagcaaatgccaagcactggtgtattcagcactgaaatacaagactcttctataataatttacacaccagcctggcgcagtagctcacgtctgtaatcccagcactttggaaggcaagaggtgggtggatcacctgaggtcaggagttcaagacaagcctggccaacatggtgaaaccctgtctctactaaaaatacaaaactcagctgggcgtggtgtcacgtgcctgtaatcccagctactccggaggctgaggcaggagaagcttgaacccgggaggtggaagttgcagtgaggtgagacgacaccactgcactccaacctgggcaacagagtgagactccgtctcaaaaaaaaaaaaaaacacaccactcaaccactcaatttcattaagatatattgatatatgcatctagtttcagacattgaaatttatattctagaaaccttacctaataatcaattagattctaatcactgacttcaacatttgccatcccaacaggttttttttttttttttttggttttaaaaagcagagtttaataggcaagaagggagaagaagcttccctgtacagagacagaggaaggggggctccaaagctgagacagtgaatctcaccccctcctttttttttttttgagatggagtgtcactcttgttgcccaggctgaagtgcaatggtgtgatcttggctcactgcaacctctgcctcccgggttcaagtaattcttgtgcctcagcctcctgagtagctgggattacaggcgcctgccaccatgcccgggtaatttttatatttttagtaaagtaggggttttgccatgttggccaggctggtcttgaactcctgacctcaggtgatccacccaccttggcctcccaacgtgctgggattataggcgtgaaccactgcacctggccccaacacagttcttgaacaacctaatgtatctctttgagcctcagtttccttgccttagaacacaggaatagtaaacaatgcccagcccacagagataattaaaaggtttggcatgaagtctaccacgtcattgttcaataaatgtattagcaagaagtaatttgcaactagcatggagcagtcaatacctattatcggtcagaagctcttcagtcactttcttccctgtgaatttgtgtctgttacccatcttgaagttgagtgtttttcgaagacgtctttgtctacgggaacagtagcccctgtaagaaaccacaaacaaaactcactcagccaagctgagagtattttgaataataaattctgcaataaggcaaggtcaagggtcaatggtttgggatattatacttatggttactagaattatcacatatcagcttccaaacatttttttcttttctttgagacagagtctggctctgtcacccaggctggagtgcagtggtgtgatcttggctcactgcagccaggctcagtcaatcctcccacctcagcctcctgggtagatgtgaccaacagaggtgtaccaccacacatggctaatttttgtactttttgtagagacagggtttcactatgtcacccaggctggtctcgaaatccttggactccagcaatccgcccaccccagccttccaaagtgctgggattacaggcatgagccaccatacccggccctaaacatttattgaacaactaaaacatggagggcaatatgattggtattataggaaacacaaagagatggaggacacagtgcccatgttcaaggaacccacattaaaattgagtagaatcatgcagagaaaatggcaaccaagaaaacaaggcaaatgtcaagttgaaaggacatgggtaatcattctcttgttagcaccttcagctgcagtgg[131 bp omitted]agaaaccccgtctctactaaaaatacaaaattagccagttgtggtggcacatgcctgtaatcccagcctactcgggaggatgaggcaggacattcgcttaaactcaggaggtgggggttgcgttgagccaagattgcgccattgcacttcagcctgggcaacaacagtaaaactccgtctcgaaaaaaaaaaaaattagccaggcatggcgggcgggcgcctataattctagctactcgggaggctgaggcagagaactgcttaaacccgggaggtggaggttgcagtgagccgagaacacgccattgcactccagcctaggcaacagagcaagactgtgtctgaaaaaaaaaaaaaaaaagaagaagaagaagaatgaggaggattctaataaatgtaaagaaagcagggaaaggggcatcctgaggaagactaagatgacaccaaacatatggagaaagaactgcaggcaggtctgaagaaaagtgaggaagccaattaggttatcgccaagaagcactacaaatgtcacctctatgccaagcctcctcctctatgctcatgtagctctttattcttccttctattacagtgtgtgacattataattatgttctcacatagttgtccactaatataaatccctttagtgcagggagaattatttttttgagacagagtctcactatgttgctgttgcccaggctgggctcgaactccggggcttaagcaattctcgggcctcatcctcccaagtaactggcactatggcatgtgccaccattccagctaggatttcatttttaaattttccacaatgccttaccacagtgtctaatatgcagatgttcaatacatacattttgactaaattagtttaaaatatatatataaataaataaatatatatatatataaaattgcaccaacctttaagtcaaagtaatacagcacataatttacaatacaaaatgatatttcaatactacttcaggggccgggcgtggtggttcacgcctgtaatcctagcactttgggaggctgaggcaggcagatcacttgaggtcaggagttcgagaccagcctgggcaacatggtgaaaccccatctctactaaaaatacaaaaattagccaggcatggtggtgcatgcctgtagtcccaggtactcgggaggctgaggcaggagaactgcttgaacccggaaggcggaggttgcagtacaccgagatcgtgccactgcattccagactgggtgacagacaaagactctgtctcaaaaaaataagtaaataaataaaatgaaataaaaataaataaataggccaggcacattggctcacacccgtaatcccagtactttgggaggctgaggcaggtggatcacctgaggtcaggagttcaagaccagcctggccaacatggtgaaatcttgtctctactaaaaattagccgggcatggtggcatgtgccttcagtcccagccactcaggaggctgaggcagaagaatcacttgaacccgggaggcggaggttgcagtgagccgagatcgcgccactatactccagcctgggcaacagagtgagactccgtatcaaaaataaataaaataaatactacttcagcatctcaatcaaagctaccagggtatagattatttaaaagaaaaaaaaaaaaagaaataggccagacacggtggctcacgcctgtaattccaacactttgggaagctgaggtgggtggatcacctgaggtcaggagtttgagaccagcctggccaacatggcgaaaccccatctctactaaaaatacaaaaattagccaggcatggtggcacatgcctataatcccaggtactctggaggcagaagcaggagaatcacctgaacccgggaggcatgggctgcagtgagccaggattgcgccactacactccagcctgggtgacagagtgagactccatctcaaaaaacaaacaaacaaacaaacaaaaaaaacagctactcaggaggctgaggcaggagaatcgctggaacccaggaggtggaggttgcagtgagccaacattgcgccactgcactccagcctggcgacagagcgagactccatctcaaaaaaaaaaaaaaaaacaaagcaaacaaacaaacaaaaaaaacaatgctctagactttctagcatatttgctgatatagcagagtaaacaggatattaacaaaagcaaagcaagtcccacaatgatttccaaacatcttgtatgtgatactaacctgtacctctgaaaatctccatgccgtaaaccatgctgctgctgggattccttaataatctgaagaactagagtcgagattaaggaaaatcttaccatagcaagaatccaaacaaatcaaaacctgtaccatcagtctatatctgtgtcaaaccacaacacattaaacatttgtgaaatatagccaggtacggtggctcatgcctgtaatcccagcactgtgggaggccgaggcgggtgtatcacctgaggtcaggagttcaagaccagcctggccagcatggtgaaaccccgtctctactaaaaacacaaaaaattagccgggcgcaatggctagcacctgtaatcccagctactcgggaggctgaggcaggagaatcgcttgaacttggaaggcagaggttgcaatgagccaagacagcgccactgcactccagcctaggtgagagtgagattcagtcacacatgcacatgcacacacacacacacacacacacacacacaaatttgtgaaatatttagtacactggtgagatcttttgtaaccattttcaatatctatcttgtcacaggacagggctaacctacaggaaaactgattgcctgaactgttactacttgcaaactgaaaaaggagggcactactggccactggaaactgccaaaacccagtttaaattaagctgatggattctaaatgctgactataattggggtgcttcacaccaattaacacctagaccccacattttattcattcagattcaggttataaatgacatgtactaagcctccatttgcataatctccaacacctgccaaatctaactttccttaacagctgtgatgcttagagagtctatgattagcacatgtcaaccaagctaggctacagtttgcataaaagtattaaggtttttctttcaaaagaagaatggccagattctccttttaataatcttaaaatatttaagattatgtactaatctttagaaagtccaatgaccttcatctatataggtatagttttaatgtttcctcaacacttctctagagacatattttaaaatagtgaacgctaaaaggactctttaaattactaaaacgggacaaagagatataaaggtctcagtaaaatcagggctcgctagcgtctacttggaactattaccagtaattcaaaatatttaactccaagcgcctgagaactttaagcacattaagatgtcaagttgaatgtgttatttcagaaactcgcctacgttttctccatttgttattcatttcaaaaggtcacaaactagtaccacaagcacttggttgagatacacactgatggaaactagaaaccgattcctccagcttatatgaatgactgtcagcaagataaaatgcctacagaccgatcagaaaaaaatgacacaatcgatattaactacggtaacttacaatcaaaatgggcaacaagcttttcctgagtcaatctttacctccactttcaaagtatcgagctgtaggttttactactcagtctatgacgactgtcagacaagagtattaagccaaatgtcaagactgcagtttcctctccccagttcagtggctcaaggtgccaaagcaaggtgctcaaggtgtcacttggtcacaagccctccaactggacaactgcggggcaccaggggaaacctgcctgatatcccagtgccactggaagaaacggacctagccaggacggcgagggggacacgaggaaagactagtcgagagacagaccccccccggaattctgagcaccaaaaggtaagggcgagagaaactgcaaccctcggcctctcctgccaggacttgtcgggacccgccgcctctcccgcccccagccctccagttcgacacgtaatcattgcgagttaggcccgattactctaggatactctccaaactcaggctatccccaaattctttgtttgccttcgatccggccgaagggcgttcgttttctttattttcttcccctccggcaccacgtccaccgccgctaccgccgccgccactgccaccgccgccgccactgccgccgccgccgccgccgcctgggacctgcttctcagcagccatcttgcccctgcgccgcagagcaagacgggataggggaggcgggacgacctgggcgggtgagagctggacctgcctggccgggctgatgggatagcggcggactccgccgccgtcggcccttgctgcagcagggcgccatgtgctggagcgcgcctgcgcgagggatcctgtcatcccgggtccggaattgtggctggctaggtggggacttgaggccgcagtgagaccgtggctgctgagatctcagggggcagtcccacctcccacccactaagggcggagaaccggaggtggaccccaggtcctgcatcctggactggggatctggttcacgtcctgcccagcagaaagcaggagaccaaagatactggatttcggggtgtctgcatccccagggactcaagagatggggtcctccctaccggaacgggacaccccgtccgtaagggacccgcctctgcctgccctttcctctgaggctggccgtaagaacgccaagccggaggaagcgctgcgcagtcagcagacggtgtcctaacggggtgactttctcagaccgcttggggccgtggaccactgcactttggggccgtcagtccaaagagggagaagtgttgagacatgggaaaatatgaatttttgctttgcaccttctagagtctgagacctgggattccaatccccgctccgtcattagcggcagggacatgttgggcacgtaacttaatctccctgtaaatctgttccttcatctatgaaatggggataaccaatttaagtggttgttaggaagattaaatgacggattttttttttttttttagatagagtttcgctcttgttgcccaggctggagtgcaatggtgtgatctcggctcactgcaacctctgcctcctgggttcaagccattctcctgcctcagcctcccgagtagctgggattacaggcgcctgccaccacg[174 bp omitted]gaataaggtcaggagaaaaagaataaggatctgatgcattcagatttaactaactctcccatacatctcattcctttctcagcagatccctcttagaaggaagtgttaccatttccttgttacagctgaggaaactgaggcatggagccaaagacagagcctgacacaatagatgctcagtatattggattgaattggagggaa[134 bp omitted]tgaaaccccatttctactaaaaatacgaaaataagccaggcgtggtggcaggcgcccgtcatcccagctactcgggaggctgaggcaggaggatcgcttgaacccgggaggcggaggttgcagtgagccgatatcatgccactacactccagcctgggcgacagagtgagactctgtctcaacaaatacaaatacaaaaaactagccagacgttgtggcggacgcctgtagtcccagcccctcagaaggccgaggcaggagaaccgtttgaacccgggagacggaggttgcagtgagccgagatcgcgccactgcactctagcctgggcgaaagagccagactccggggcccctcatccgcctccgccccgcgtttcctccccccgatctcccaggggtcctcttttgagggcaccccagcccctcgacggtcccgggatatcctgcacccctgccaggctgcagggaagcgccgaggcgcgcggagtgcgaggtccgtgctccctgcggcgcggcgcacacgcagggtccggggtcgacccctccaccgctccggcgtctgccggggaagtcagtccgcctggtcagcccagaacccccgactgcgggggctggagctcggaagcaggtacaagcgccactctccgcctgcgccgtggaatgcgcgccgggaccactccgcagcccttcccccagcgccgccggccgctgctggggacaacctcgccctcctgtctcttgctcctcctcctgaccccagcgcacccccatccccgccccagatgaggcaaggctccctccgccttcagcccggcagagtcgcactaggagttgcagcggccgcagccccgggagcttcccgctcgcggagacccagacggctgcaggagcccgggcagcctcggggtcagcggcaccatgaacgtctcgggctgcccaggggccgggaacgcgagccaggcgggcggcgggggaggctggcaccccgaggcggtcatcgtgcccctgctcttcgcgctcatcttcctcgtgggcaccgtgggcaacacgctggtgctggcggtgctgctgcgcggcggccaggcggtcagcactaccaacctgttcatccttaacctgggcgtggccgacctgtgtttcatcctgtgctgcgtgcccttccaggccaccatctacaccctggacggctgggtgttcggctcgctgctgtgcaaggcggtgcacttcctcatcttcctcaccatgcacgccagcagcttcacgctggccgccgtctccctggacaggtgagccagcgccttggcctccctgggagatgggcatccacgcgggggatggagcgggaggcgggactggggaccaagaagggacgcgcagagtgggacaggacactaagaaggcagtggaagacaagcgggcgcggaggaggaaaaagaggaataagaatgggggaccgtggtgtccctcggttagatgcgtcctggggcctggaagcctggagaatgtggctctccagcgccgcccgtgcctgacaacgcgcagcgtttcccagtacgacgcgtttgtgcgcgttcatctcgcttgagcttaatgccctccgtgagggtgggataggacaaagtgcccaatatacagaagagttgagttcctaagtaactcgctcagagtcgccagccagggatcgggtgcgtgaagtgaccgtctgtctcctgcagccaacttcaggcgcctccactgcgctcgcctccaagccacggtttggttggttggtgcagctggctcaggtccaggctgtggatcttgggtcctttgcaaggatccactccggagtcccagcgagcgtgcctaaaggtccctagctcagtcccagcccactctgcctctcgcctccaaacaaaacaaaacaaaataaaatccaaaacaagtcggggccgggagaggagcgtgccctggggttcttcctccccagccagaggagagcgagagacgcacattcgggagagcgcgggactcaggtggagcttgaaaggacactgggatggttcctggggaggaaatccgggtatttcccctctccatcctctggaaaaacagagaggcgaggccagactgcccccacacctcctgtagccactgagcgcgaagtgcgttggttccgagcgcgctggtgggatccacaaagctcgcattctctcaggaatcccctgagaaattaactgtcccttgcccaacatgtcttctccaggctgtctgctagagcctcaggcgcctccgccctccctcccgcggcaccgtcaccagtgggtagtcacagcctcccggagcccatagccggttctccaacctttagtcttcagtggctttggggtgccctctcagtggagactgtggttgcagtccccgggggcagcgggagaatggcttgaaggcacacctttcctgctgccgggcccgccccatttccaggctccgctgagtgtctgggacacgctgggaggcccccacctccgccctcacgccgagcctcacccccacctcctctgtgtgcggtgtaaccatgcgctaaggaccttcctcgagagcagccttgggaccgaggtgcaggggtcgcggccctccagcatgaatgtgcccgctcagccgacgtctcccttcccggtctgaccgcaggtatctggccatccgctacccgctgcactcccgcgagctgcgcacgcctcgaaacgcgctggcagccatcgggctcatctgggggctgtcgctgctcttctccgggccctacctgagctactaccgccagtcgcagctggccaacctgaccgtgtgccatcccgcgtggagcgcccctcgccgccgcgccatggacatctgcaccttcgtcttcagctacctgcttcctgtgctggttctcggcctgacctacgcgcgcaccttgcgctacctctggcgcgccgtcgacccggtggccgcgggctcgggtgcccggcgcgccaagcgcaaggtgacacgcatgatcctcatcgtggccgcgctcttctgcctctgctggatgccccaccacgcgctcatcctctgcgtgtggttcggccagttcccgctcacgcgcgccacttatgcgcttcgcatcctctcgcacctggtctcctacgccaactcctgcgtcaaccccatcgtttacgcgctggtctccaagcacttccgcaaaggcttccgcacgatctgcgcgggcctgctgggccgtgccccaggccgagcctcgggccgtgtgtgcgctgccgcgcggggcacccacagtggcagcgtgttggagcgcgagtccagcgacctgttgcacatgagcgaggcggcgggggcccttcgtccctgccccggcgcttcccagccatgcatcctcgagccctgtcctggcccgtcctggcagggcccaaaggcaggcgacagcatcctgacggttgatgtggcctgaaagcacttagcgggcgcgctgggatgtcacagagttggagtcattgttgggggaccgtggggagagctttgcctgttaataaaacgcacaaaccatttcacacacagtgacagcgctgtttcgcgtttctcattgtcttgagattctgggaggaagcctctggggcttcacagaggggctccctaggggtaagtgcaggaccctttgcagagctaccaggaaagagggctgatcacacctcaggcagccgggttacaatccgcataaaaatctgagtctggggagcgtgcgacagaggcaggcagattgtttaaggcgttcgataaagtcggttgatgacagacacagatgtgtgttcccagccgcatttgtgctctggtgtgtgacaggtctgtccttgcctgctttcagctcccagggcccctttgagtctgggcagcccagtcagtccccgtccatttttggccttagcttttccttccctggctacatctgggccaggatcaagtctccagcagctgtttcactccccggcggggggggggggggcaggaaagtctttccctggcaggttgggctccaggtgcacagcactgctgggctggcgcaagctgagaatccacttcaggacaagaatgtcccagggctttgctcatgagttggcctttacctgttgtcaggtaaaactcccttcccagaggttttttttgcttctgttttttttttttttttttttttggttgttgttgtttgtttttcttttgagacggagttttgttcttgttgcccaggctggaatgcaatggcacaatcttggctcaccgcaacctctgcctcccaggttcaagtgattctcctgcctcagcctcctgagtagctgagcttacaggcgtcgaccaccatggacgctaatacggctaatttctgtatttttagtagatacggggtttcaccatattggccaggctggtctcaaactcctgacctcagcttcccaaagtgctgggattaccagagttcttttgttctttttgttgttgttgttggggggaagtggggtggaaggcagaatctcgctctgtcgctcagactggagtgcagtgttgcaatctcggctcactgcaacctccacttcctgggctcaagtgatccagcttcagcctcctgagtagctgggactacaggtgcatgccaccacgcccagctaactcttgtgtttttgatagagacagagtctccctatgttactctggtctcaaacccctgggctcaagcagtctgccctccttggtctcccaaagtgctgagattacaggcatgagccaccacatccagggttcttgagccaaggctctttacacaaaatcacttcagtgtttaaggagagcaaggagactctcaaggctgtccccatctcacatcgttaagcacagaacactctgcccaaaggtttgggtcttaggtaggctggtgtcagccaccgaaatgcaggggacactcgtgggccctgattggaagtacaaagtcagggagaggtagaggtcctacacctgccaggtccccctgggcaggcattgagcgtctcaacgggttccaggtggtggaaatggagcgggacagggacaccaaggcaggtgcagtgtgggcggggctgggtcctgggctttatctttgagcgtttgcggaactggggcaggggctgccaagtgcacggccccagagtccttgcccagagcagctgcctctggctaattgctcagctgccagagaagtgactggaatagaggttgtagcttaggcaccgctgctccctccagtccctccgtgcagccgatgatggccctatggtccctgctccatctcaccttcctggggttcagcattaccttgctgttggtccacgggcagggcttccaagggacagcagccagtaggtggagggcaaggtcataagctttgggacttgggccctagggcacctgagtgaccttgacttttctctctcagtctggccatccctcttcaacgtcaacttgtccaagaaggttcaggaaagcatccagatcccgaacaatgggagtgcgcccctgctcgtggatgtgcgggtgtttgtctccaacgtgtttaatgtggtaagtgcctctaggccaagggccccaagtgctgagctgggcagggaacaggactcagccctggatagtgctggggtctcctgctgcgttctttcaacacagcgctcaccctgaggtgatgcattgcccttcccccaggacatcctgcgatacacaatgtcctccatgctgctgcttaggctggtgagctcctatgcctggggaggtgggatgggaaagcccagctgagtccagctcagaactaccagccttcatcaacatgctgagcttaggggcatggatatgtggagagcaggagcctcagtggtgcccttgtgtccccagtcctggctggacactcgcctggcctggaacactagtgcacacccgcggcacgccatcacgctgccctgggagtctctctggacaccaaggctcaccatcctggaggcgtaagtgagacagttcctgccccaggaatctgccatgcatagccctccttttcccccatctacaacctagaggctgtctgagtgaatatgaccctcctggcggtccccgccggactagcagtgcaccttcactgcctcgaattcccctcccactgccagaactctgaaagcagctggggttggggttgggatgccagggtctccccccggccccgtccaagaaggggctggggctctggctgtggtgcctttccccacaggctctgggtggactggagggaccagagcccccaggctcgagtagaccaggacggccacgtgaagctcaacctggccctcgccacggagaccaactgcaactttgagctcctccacttcccccgggaccacagcaactgcagcctcagcttctacgctctcagcaacacgggtgctgacagggcaggggctgcagggttgaggaggggaggaggaaggtgggggaggggaactcccaggtctgtggtgcaggggcagggtgcggggcaaggggaaggggcaaaggcagacagaaggcgaactcccaggtctgtgttcagagcagtctaccccaggcttaggcgggcagcacctgctctcccactgcgccccccactcgagtggcagcccatctctgtgctcagcggtagcctcagggcccctctctagggtgacagactcaaacattcgcagcagctctgcaatcccagaggtccgagcacatcagtcttctgtcctccccagagcaactgccctccacagccatggcgactgcagtggctcggccccttgcagcaaggccagaggctcaggttgccatggcctcactcctggaaaccacctgaaggtgcagccaccctgtataaacccatcaggtgacatctaacttggcagagaagtcctacccttccctccatgagagaccacagcggtagccctggggatcctgcttcagctgtgagatgatagactgacgagcctgtgaccacttctccctccatcatgaagtggtgcaaagtacatttatttttacaatgaaagctcatctatgaatctgataaaggccttccttcaactggagacaatttgggatgttgcaaaacaaggtttgggaagcccttctatggatcggttttgtgtccaagtctgtccctgccaaaagccatcaaaagtctccatcacccctgggctccagtctgctacccccagacttggcagctgggatctctccttcctggttcatagttctcattcccacccctcagcgatggagttagagttccaggcccacgtggtgaacgagattgtgagtgtcaagagggaatacgtagtttatgatctgaagacccaagtcccaccccagcagctggtgccctgcttccaggtgacggtgagtcaagtcgggaggaggccgacagagggctgctggaggcgggtgggagtgaggatgcacggccagaggccaggccccatgcccccgatgcccacctccttcccccccgccgggaaggccctgacttttccccttccagctgaggctgaagaacacggcgctcaagtccatcatcgctctcttggtgcctgcagaggcactgctgttggctgacgtgtgcggggggttgctgcccctccgggccattgagcgcataggctacaaggtgacattgctgctgagttacctcgtcctccactcctccctggtgcaggccctgcccagctcctcctcctgcaacccactgctcagtaagccctgctcccttacccagtctgccctgtttctccccggtcacccactggtgctcagctcgctgggcaccagagacacagggactggcccctgagcatctccctgtgccctgcctcccccagtttactacttcaccatcctgctgctgctgctcttcctcagcaccatagagactgtgctgctggctgggctgctggcccggggcaaccttggggccaagagcggccccagcccagccccgagaggggaacagcgagagcacggcaacccagggcctcatcctgctgaaggtgggcaggggctggggggtaaggaatgaggcctaggtgcacacctagggctggggtgagggcacggaggtccaggtgtgggtagaggccccttgcatccaccctgctggctctcctgtccctggtctccaccatgtcctcctcccttagaagaaacaggtctggggcagggagcaagctgagcctccctgaagtcccaggtgacctcaatcccctgataacccatgccttgcacagcctaagagggtgtttcttcaactgaagatggcctgaaatgggccagacccaaattttcatcagctgagaatctaagaaaggaagcgatacaggctgatgacccctggggttcgctcttccgctcatgttgaggggaccttgaagaacagctcctttccctgtatctctccccacagagccctccagaggagtaaaggggtcacagagaagctggcctgagactgctgaccgcatcttcttcctcgtgtatgtggttggggtgctgtgcacccaattcgtctttgcaggaatctggatgtgggcagcgtgcaagtctgacgcagcccctggagaggctgcaccccatggcaggcggcctagactgtaaaggggcagggcctgggctgcacaccttaggatgaagtttgctttcccatggctgggggcgggccatgacagggcctctggattaagccaccctgagctctccctccgctagcacacaagcacagagcgtgaaataaacccatctccagtgcaagtgtgcctcaagggtcagtcttcaatctcgtcctaaataggtggggccctattttttgcttccaacccccattttgctccttaacttttccccattgtccctgtctcccagcccacaggcaggcagcctaattgctccttctgcaaccacgactgcctggccctgggccaagaggcactgaggctgggggccagagacaggggcctgaggaaggctgtagagggtggggcggaactcctcctccgaacgcctcctgcagtgtgctggactctagggaaaatggccagtgagcctgcctcccccagccacctaggggactcctgggagggaaaggtcccagacctcaggcctgtgggcgggcgggaatgtgttttaagagagggggtcagtcccgactgcctttcctccaggagctctggctgcttctctgagccctgccacatctctgggctgtaggggagttctctgtccccacctctgacctaggctggagggagggcccttctgccctgctgctcttggtacacatggagcagcagtgggcacaggcctctgtcttccttctctcttttcctgtttcagaagccatcagggtcataaaagccaaggtgtggagggaccccaggcttccgggagagtgctggttcggctgggaacacgggctgtggggaaaaagcaggagccaggactagggggctcagggacacagctcccggaggcgtggagacaggtctctgtcccagaggacttcaagctcacccagcccagaggcaagctaacactggtttatctgtccaatgacacgccagtctggtggaaccaggcagggctagcagcaggctcaggcagaggtgtcgaaaaggcgatcgatcatgtcgcccacctgctccaccccgtacttgatgtacttctccgggttcttggtgaagggcacgctgccaaacctgaggaggcactgtggtcaggggacagggagggccgacccctccccagctccaccctcagcctaaggcactcctgatagtcttggaaggggtggccctgagcgattccctgtctggccccgccccaaagcccaggtcgctggatctgctgcctaaatccaccacccttctcctttttcccttgaggaagaggagcttgaagaggcccactggggctgtgggcagcacaggctgggaggggaatggaggcctcacttctgtagaaaggccccgtaggtctccttgacaatggtcttctgggcctggcgaatcctgtccctctgctctgtgtctggaatagcccaggccttctggattttgcacagttcttcgaggccatcattgaagccctggccaccaaaaaggtgaaaaaggaaggcacccagagacaaacattttgggtctgtgttgcctcaacagcagcagcaagcagtggaggggagaggaccccgactcaccttaaaacgctccttgataatctgccgctccttgtcccggagctgggaagccaggagagatagcagagaaagctcacttcagagcagagcagccttcccccactcttccccaaacacccttggtctgggcctgtctcctgtgtcctgatggccacatgcatcctttgctctctgatcccagagggatgcttgtccactttttcccagagacacgacaaaaagtatcccgtctgccagacaccccttcccagcccaggtcttgagcccaccttgactcccggctggaacacaggtagattcttctctgcgatgtaatcagtcacctttaaccagctgccagacagaaagagaagcatgagggcagagggtggcctgcctcagtggcctggcttgtttcgtttgctaaatctctggatctacttggtgggtggtggtaggaagggatgtgggtcacaactaagcaaacaacaggttttcttcctgggaagagaaaatctttaaactggtcactttttgagataacattaggaaacacttgagtgttcaataaattggacaaatactgtcaactatacttcacatcaatatcgtggcaaactaagatggagaaacagatgagaaagaaaggagtggagggcagataaatgagaaggaagaggtagacacattcaaagggaagaaacaaagccaggaagaaagaggaccagagaagcagcgggatcctcacagagcaaggctcagccacgttcaagtgctctcgcgaccttgctcttctcctaggtaaacattacccacgtctctgagagccagctcttcaatcattcttagccttgacacttggcagactcccctctaaagtggccatagtgggcccctaggagcaggtagtggtagaggagggggcttctctctccaccccgtgagtttgattagaaaccaagtggaggattagggtccagaggacaggagttccccgtgaccgactctgtgtcctgaggtgctgagaaggaagagtgcgtggtggcacaggggcccatgcaggagcagggcgggcccagcctctcacctgcgctggtaggtctggatctgctgctcaatgtgctcccggtaggagcgctcagcagtcttctgtgtcactgccaccagctggatcagttcagacctgggtcggggtaggggacagaggagaggaggacaggattggctcctcaggcccaaaggctgcggcaatgccgggagggcctcccattgcaccccaaactccacaagctctatggcatcccaccttccgggtcctggggtggaggagactgaagcaccccctcccctctcgtccacaagagaaggagcccaggggggcaggggctggcacagctgcacagccgaggggaaggtgagagccgcagactcactcccgcaggccacttacttctccagggacttgaggatgtaattgtagttgttgtgcaggaagatggcgctcagagctgggtcctcgtacaccttggacttgctcagcaagttcaactgcaggttgcccagcactttacctgcacagggaaaaatggggccacacccaccatggcagtctgacccaaacgaccccaccccaggacccgcgaacgcgctcctatccatcgctcctcgtcctgcctcaggaggccttagcccaactcccctcagcctctgaactagaggtcaggttgtggttccaaagatcagatggcacttaggagagggccctgggaatagccagagagcacagacagaaggaagggaaaggcagggcatgcaggcagcagggctgctggtctgcccgggagaacactcacagatataggtgcttagcagccgcttgctgaactcagagctgtagctggtggccgaagagctggtctctgtgagaggagaagtcctgttattgcagtggcagcagccaagaccctcaacggcccttcccccaggccatgcagcagtctgaggggacactgagacaggccctgggcttccttgggcagagctggctgcctgctaagccacagggtggcccctgccgcaggaagcaccagccctggagtttttggaacccagagctgccctctatgatgggatggagctggcccatgtcagcagaaaagctggcaggaaaagagtgagatgccagcgccctgtcccctcctgcccccacccaccctgggtggtttctacaaggccccctttttccttttgtcaacagcagagtcttagaatgggctccccacagcctctccaccttctcccctacattcgaacatcccctctaccagaccctactgaacagacgaagctgcggcctgcacagtggggaaggccgagtggggacagcaaggcagggaggccgggcgagcctagggggtgtatccagggctctagcctgggcaggtgctgcggataagctcagagacagagtggccttgaagggagcagagagagttgagagcaccccgagaaaactcatgtcccctctgactcaggctccccagtaggtactgagagtcagtccccagggaacctcacccaccaagcttcagagggacaggagggggctgcagaaccgcactgcttacctcgggggtctaaaggaatattgtatgtgtccccaagaactacggagtgaaaggcagtgcacacagaggggacagagggagagacaaaggagggagaaagatgcaaagtgcaaaaaacaggttagaaacggcatgtcaacccgaattaagcagacctctccccacgacagccaaaacacagatagcaagacacagcaggcgggaccctctgaggaccagggaacaccctggaaagtagagagctgagaactgcaggctggaggctgcccacaggctccttgcccccaaaatgggacgggaggagagggcccagggacctcagtgcttggaatgacccagaaaggtgctcttgcttacaggccaaccccctgagctccagtcccagggcagggccagcaggaagacgcccagcgggccctgagacacttgctaccctctgaaggccagctgagcgagcctgattaggagagcaggcagacacgagagaaggatttgggaggggggcaggggcagaaaggacaccttccaaccaaccagcaccgctcccagagtgaggacactgcttccagggcgaggacggtcaaaggggctgagggaggggccagaggtccagtgtctggtcttgaaaggtgcaggcaaaccttgctctcctgatgctcagccccagggaccctctgctgagcacacctcaacccctccacagactggagatacctcctcactgctacctgccctctaaccccatgtctccaggcaaggaggcgagtggggcagggggcccaactgggaggtaccagtaccttgggaggccagcatggcgcctgccgtctcctggaagtccaaaagctgctgcaggaagaggatggcctgggtgggaagaaaacggtgcagaagggcaagtggcaggcccggccgacggcctcccacagcgacccctctgagtgcccagggccagcccagggctgggatccgcccagtgaagagcgcggctggaaacttcattttcactctagcctgccaggaaaggccctgtctgctagagacactaaacatgtcactgtccatcctgccacccaggactgctcacaaaggtgcgagcggctctgggccaggctgagtcccttccaccagtactctgcctggccctgggcctgggcctgggccctccttcctcccctctccctggtgtcctcaggcagcacccacattgctggtgagctcgtgtacggtgccgtccttcggcatgttgtactccttgtccgggtcattctgtggaaaaacagcctctggttccctgaagcagcccccagcccaccccatgccccagtgcacctgctcatggtgccgcctcctggcagacgggtgctaggacacctctcaggcacaaaggctgagccaggctggaccaagggggagaggcccttcccacttcagagggcttggaggccccaggaaggaaaggaaggcacatgggtgctgacaggccagtggcgcagctggctgccccgggacaacgcaccctcttggaggcctgctctgagagtcccccagggccaggtcactgtggtgctgggccgggagggagggagaaaggggaggacagcagggaccttgatgttgtctgcgaagtcctccagcgctttggcaccgatggtctccatggatgtgatgaggccaggcagcttgttctttgtgctggcagccgtgccctgaggaagcacaggggagcccccagctcacctccagtcgctctgtgagcatctcactcacccagggcccttcctaagctgcttccatgcaccttcagagcagaagtgtgggacagagaatggggttctcccagggagggatggggcggccacacccggcagcacgatgcctcctggctgtgtttttgagggcccctcgcccacatacctggagcacctggtcaaactcaggcttggtctgcttgaggtgtcgcaggatggggaagacggtgagcaccgtggagaagtcgtgtcgcacaatggccttccgggcagcagacacgatgttctccccttcaagcatcagcccatccagggcatcctgagggggcagggagacagttcagggaagggtggggcggtgggagctagttctgggctagtgggggatccttgcagtatgtaggggggccagtgtgcaggaagaggggtgacggggaggtggtgagcgtccacccaggaccggtccccagggcacgaggtggtggtggtgggtggagttgagggctgcaagagtctgttgtgacagctcttgctggggctggctgcagagcccccggggcggggcgggacctgtatcagggagtcgaaggtcttcttctggtggtgctcggggatgatgtcggccagcagctggtactcgctctgcgccagcttgacgaaggcactgacgcagtggatgtaggcatcggtctccacgtccagcatgtcatctctccctgggggatggcacaactcttgagctgctggtctggggccagccacactcctggctgggggcggcgtgggtcccccagctcctggcctgtaccccacactggcagaggatggggaagaggctgactgttctggcagaaagctgcaagggagccagcaggccccgccaggttcgaggggaataaaaggagctgagcccagcctttgttctggcttcattctcggctctgcgcagacagtgggatcagacaccagaggcaggagagtgacggatggaaagataaggagggaagattcctgaatcagcgtcctggataaggtggtttgaccccaggactgagcattctgagttgtacctgaaagagggcagcccagggtgggcaggtggctgtgccacctcaaggaggctggcactggggtcatccatgtgggcaaatgcggggcctgtgaaggaagtgaccagcccagtcagggcttctggaacatctaagagggtggttggctgcagcttctgaggctggctggcatggggtcaaaatctaagaggctggtaagtcccagagaggaggggttgccagctgccccaggaggaggccagaccctattactggaggccacggcgggggcgcctgcaggcaaaaccggcggcagaactgcctggtcctatgtgccaagggatgggctccgaggggatcagagctctgaattgttgcaggaggcggacgtcagggctccctgccctcaagggagccaccttccctctctgcctgctttccgaggagcagcggcttctccccttggcccaggcctgacagacaggcacgcactcccatctggagagaggcaaggagacctaggcccaaaagagagagagtggagagagaggcgcataggcctggcccatcctcagagcagagtgggcccagctgggccaggcaggagcaggccatccggggaccgctgcgaaggcagtgtcagcggctgccctcgggctgggctgcggtactcaccggccagcggcccgtgcttgtcgttcaaggcctcggacaggtgcttaactcggaaatcatgctcgtgacctggcgagatgtcggccgcacaaacacaagcagcgtttatccaggggccaggcaggccgccccttggggtacagggaagaagcccttcatctccaggagggggacgtcagatggggatggggaagggggcatcggagagggccctgagcccctcctctacctcaagccaccttgggaacagccgtttcaagcctgacttcagtgagcacccaggaccgtccttagctgctcatttccccgagcctggaggcccagggaaagcggagaaggaccaaggaggggctgaagagctgatgcttggccccaggggggttccccacctcgctgtatttggggaaagccccagtttgcctgtcctctgctgcacacactcccctttctaaagatgggaaggccgggaggcctcggccagctggggcctgccactgctggtctgagcgtgaaagggctgccccaagacaaataactttttctgagttcacacaggagacaaggacagagacagggaagggaggagggaagcctcagggagggcagagctgccatcagccagagaggaccaggccgagggctgcgaaactgtccctgtgcccgctgaagcccgagtggcatcggggacctgccgttcccaccctgctcccctcagggtttctcccgaggccctcctgggggaggctctgccctgccaagtgcgtggacacacagtggaggaggaagggacaggaggggaacacagggtgattaccttccagaggaatgaggttagagcccccctttttcccatctagaccatgctgggaatactgtttcagaaggttctgagccttacggatcgtccctgtcaccagagccacacagagaggagataagaagacctaggaaatgagtgagagaaaacagcagcggccctccacctgccccccaggccccgcacccagctccccaacagtgagcaggcctttccctgagaccaccagagacgctggggacaaggatgaaggaaaggagtcatttccttctccaaatggagccttgattctactaccgaccctccttgttctggatttcagctcatttctgaaaggacagagggtaatgaagatggaccaagatccaccaggagaagtcaaaaatatggagtggcatcataatcagaacaggcgagggctcaggtcggaggagcccgtgacaaagctcgcatacccagagggcacaaccagggtgggagagcctggggggcaccctgaagccagcaggcccccagcccagccccaaactccaggcagagttctccgagcatgctcagtgttgggacgtacgccaaacagcagccagcaggaagccaccctgactgaacttccgggggagcgctgtgcccaaggcggacggctcagagacccagaggcagcctagccccacaccagagttccccaaaccaccaaagcgacaagaaaaaatccaaaagtcaagaaggggttaacagaagccaccacacagagcgcctggagggtgtgcacggaaggagagggcacatgctcttggcatgggggagaaaaacaatagttagtatcacaagtgaaaacaatgagaacaaaatggcagcacccacagccgcctgggtcagcctcctttgtgggaatgagacatctcgggccagaagacgtcgggaaatcaactcgcatctcaagcagacaagtgcagctgccttgttaacaaaatgtataggggcagaaaggcacccgggatgcctcccacccccacagtctatctgagcacagtgaggctgctgtgtcctggcagctccccagaaagctgagggagaaaggggcagtgtctggaggctcactgcttacacctgcaccgcaccgcaccgcacaacaccacaattagcttgtttttttttttttttttttttttgagacagtctcactctgtcgcccaggctggagtacggtggcacgacctcggctcactgcaacctctgcctcctgggttcaagtgattctcctgcctcagcctcccaggtagctgggattataggcgtgcgtcaccacacccaactaattttttttctatttttagtagagacagggtttcaccatgttggccaggctggtctcgaactcctgacctcaggtgatccgcccgcctcggcctcccgaagtgctaggattacaggcgtgagccaccatacttggcccataattagctcctaataaccaaggcctggctcacgtctcccttgctcatgctctccccttcagcgagtgcggcttactaatgagtgaatctgattcctgccccacaacccaccaggagcagacacagacgcaggtgcacgccggcaggatgtgggtcgccgatgtggatctagcagccgccaaacccgtcaggctcccaattgcctccagggatgctgaggtcggtgcttcaccacctgggaggcctccctgtccctctcctcagaagtgggaaccgacatccccagagcctgactccctagagcctgacatcggtcctgagcccaccagttcctgacaactctgaaaccccacagctggagttttcctctagtgtctctggcccaaggatggatgtggtccactgtgagccacctgagatcagatccctcctgcctgaaaggccaggtagctgcatggccagcgggcactcttaaggcagtgcaaatagggctctggggcttctgggggacctgtcagggagccaggcagaagaggaagcaagcacagactggctggggcccaagcatcctagcagcctcatagagacagccactccccaccacacagaaggcacagagctgctccatccactgtgcaggcagctgcgcccacaggctgggctggcagtccccatttgcagcaggttttggctggtgggcaggatttccacactggagggagaaggccccaggcaccagctccctaatgctctactccctgagggcagcccctgctctgcctgtttctccaaaccctaaacaaaggcctgcaggggagcgggtgctcttgtggaacagacacctcactctctgaggggcatgagcaggcagggactggagaaaccaagggtgtaagtaagctctacccaaagcttgttgtcataagcaggtgccacaggccacaactagggcatgtgcccacagcagcagctggacagggggccagcctgggtgggagcagccccggcttctccagctttctttttcagtgcaatctcagcagccccaccccagaacatcccagcacatcatcgagctgcgggcagcatctctcagtggccagacatagccgggcttgccaagctgtggctggcagagacactgtttacctggagcacagactataagggatatgatgccggggagaaagaacagacagatgacgagatgttcacccaggacagcaacacccaccggccccggcctctcatcatggtgcccctttccacaagtcactcgctcgcactggagcccaaagccagtttaagttcttccgagaggatgctctggggtttctttcctttctggatcaactgggaaagtgaaattctccccatccagctctcagctacacgtcacttcagatcaccctgcctttctggaaggtgaaggttggagcacctatccccttgctatcccagcatcctggctgcagtagtgtgcctggccttctgacagggcgacgtgtgtgtgagggaggaggcctaggcaggggctctgcctcaggcgggattcgctgagcacctgtgttactcccctactccaaagaagctgtgtaaccccaggctctgctagctggaaggaagagtcttgctcttggggggcttcactgggtgggtagacacttgctttctgtcctgtgtacctacagtcggggttaccacgacgacaagctctggaggggcctgacgctgcgaacgctagattggactaaagcagtacagtcccagtcagcctctggctgttgcagagatgggccaggatgggggctcacctggccgcttgactggcttcttggtaggtgtgtctttcctcttgttggggatagcaggggagtagggaaccccagaggaagaactgctcttatggaaatgctccttcagtcctttgatggagcggtccagctggctggagcgtatctggtagtagacgttcatgaaatctgaggagacacagagggatagaggtacggctgccaggccctgtctctgccttgcagacccaccatgtctacctgtcaaacctgtcaacccttcttagcatctgctccctgctctggtcacaagccacccatatcttgtcccaaatcaggcaaagtctttcaaagtctttttttttttttttgagatagggtcttgctctgttgcccaggctgcagtgcagtggcacgatgtcagctcactgcaggctcgacctcctgggctcaagtaatctgaccacttcagcctcccagagtgctgggattacaggcgtgagtcaccatgcctggccaggcagtcttaaaagagaaaaacaccctctgatagaactgataattagttgtaagttgttttttttttgagacaaggtcttactctgtcgcccaggctggagtgcagtggtgtgatcttggctcaccgcaaactctgcctcccaggctcaaccaattatcttgcctcagactcttgaatagctgggattacaggcatgagccactaccacccagctaatttttgtatttttagtagagatggggtttcaccatgttggccaggctggttttgaactcctgacctcaaatgattcaccagcttcagcctcccaaagtgctgggattacaggcatgagccaccgcccagccctagttgtaagcttttttttttttttgagacagagtttcattcttgtcatccaggctggaatacaatggcacgatcttggctcactgcaacctctgcctcccgggttaaagtgattctcccgcctcagcctcccaagtagctgggattacaggcatgagccatggcgcccagccctagttgtaagttttaaatagtacttttttttaaataaaaaaacaaagttaatatccagattcaacttggtaaggggtcaaagaacatgagctctataggaagcaaaaagacaacaaatgtcagtgaatgaaaaacacacatctttagccattaataaagtataaattaaaaaaattagaggactgtgatagtcctatcagatagcaaaaacaaaaattaatgaagaacaaatggccatggaactgtcgatgagtccatcgattggcctgatctatttagagaggagctagtgatggcaagaaggttacaagtatcttcagacacttacacctaatccctgcacccttgagaataaaccctcaagaacttcctcaaagaaaaaagcaattcacaaaggtatgtccattttggtaccattcatcaatgctgaaaaacaggaagagctccttgcacacatgactgaggaaaaggacatgaaaactatggtggatttcagaagttcccaacaaatagtttacaaggaaccccgacagaagaaatgaaccaaaacacagaggcacaggctgagaggtctggaggctgtccactgcgcctccctcttgatcctaaggagctcctgaaaatcttctgccgagctgtcatcagctcacgagccacaacgtgttcatgtgatcagatacatcgcggccgtgagacctgccgccacacagttctggggcaaggcaagcccgcgctgacaacttggtatgtgtacacacaaacaaagagaagagttggagggctaaaaagtgcaacattgccaggcgaggtggctcatgcctgcaatcccagaacttacagaggccgaggcaggtggatcacctgaggtcaggagttcaaaaccagcctgggcaacatggtgaaaccctgtccctaccaaaaaatacaaaaattagctgggcatggtggcgggcacctgtaaccccagctacttgggaggctgaggcagaattgcttgaacccagga[143 bp omitted]tgagatggagttttgctcttgttgcccaggctggagcgcaatagtgcactctcactgtaacctctcgggttcaagagattctcttgcctcagcctcagtaatagctgggattacaggcatgcgccaccacgcccagctaattttgtatttttagtagagatggggtttctctatgttggtcaggctggtcttgaacttctgacctcaggtgatccgcccaccttggccccccaaagtgctgggattacaggcatgagccactgcacctggccttctttcttttgagacaagagtctcactttgtcaaccaggctggagtacagtggcgtgatcttagctcattgcaacctccacctcccaggctcaagtcattccccgccacctcagcctcccaagtagctggctctgcaggcatgcgtcaccacacccagctaatttttttattttttgtagagacagggttttgccatgttggccaggtctcgaactcctgagctgaagcgatccactcacctcagcctcccaaactgttaggattacaggcatagccacagcacctggcataaataaaccttaatagtgctcatctttggcttatgtaatggaggcatcagggaatgggagatggacttttacttttcacccatggctttgaaaattttacaactaatcaaaaaaggcaaaggaacataaaaatcaagacaagaaaagtttgaatttgcctagattcaccacttgatatacaagtcatagaatggttgcttatattcttatattggttccagttaaacatccttttatcaaaaaaaccatgacaggtggattaaagaataaagggggccaggcatggtggctcacatctgtaatcccagcactttgggaggctgaggtgggcagatcacctgaggtcagaagttcaagaccagcctggccaacatggtgaaaccccatctctactaacaatacaaaacttagccaggcatggtggcatgcgccagtaatcccagctactcgggaggctgaggcaggagaatcgctggaacccgggtatgcagaggctgcagcaagccgagttgcaccattgcactccagcatgggcaacagagcaagactccatctcaaaaaaaaaaaaaaaaaaaaaaaaaaaagaacaaaggggagaaaactccctctgcctctggtgtgtcatgtggccaagccagaatcccttaccttggttgcggccatattccaccagccagcgggagatgcgaatgacatcctggagcacgctctcgggcaggtgctccagggtcacgtcctcctgggcctccagatcatcgtcaccactgatcagatccaagatgagcacgggcgagacgaccttactgtgccgcgtcatcaggctgcgaaattcggactccagggcctccttcccgcgctcaaagagcagtttctgcacagacaacagaaggaagcaggtgcctgctgcttcagtgttctgccagtcctggccttcccctgcctgtgccagctctgtcttcttaactcagggcctctgcccttttctgccctgatatcttttttttttttgagagggagtctcgctctgtcaccaggctggagtgcagtgacacaatcttggctcactgcaacctccgacttcctggttcaagcaattctcctgcctc[134 bp omitted]agcctcccaaagtgctgggattacaggcatgagccactgcacctggcctgccctgatatcctttaacccaaagaagaaacgctgggaagcggccttggtgactcctttacttcatgttctctcaaaatttgtgtttacaggtaaaacccag[147 bp omitted]tccatctctactaaaaatacaaaaaaaaaaattagccgggcgtggtggtgggcacctgtagtcccagctactcgggaggctgaggcaggagaaaggtgtgaacccaggaggcggagcttgcagtgagccaagattgcgtcactgcactccagcctgggtaacagagtgagactccgtctcaaaaaaaaaaaaaaaaaaatactggccgattattttctcactgaaccgttaatttgtcttcttgttagtggggggtttgcaaaagaaaataaataaataaattgaacaatatcaagttgaaaacttttgtgctgcaaatgataccaccaacaaagtgaggataacccacagaatgagagaaaatatttgtaaactatgtatctgataaaagacaggtatcccaaacataaaagagaatgaatctgtccacacgatgacatatataagagggtttatagcagcattattcacaagagacaaaaattggaaacaacccaagtgtccat[135 bp omitted]gaaaccccgtttctactaaaaatacaaaaaattagctcggtgtggtggcaggcacctataatcccagctactcgggaggctgggacaggagaatcgcttgaacccaggaggtggaggttgcagtgagccaagattgcgccattgtactccagcccgggcaacaagagcataactccgtctcaaaaaacaaaacaaaacaaaaaaccaaaaaaagaaactgtggtctatccacaaaaaggaatatcatatggcatgaaaatgaaatgaagtactgatacatgctatagcatggattgatcttgaaagcatcacgctaagtgaaagaggccagtcacaaaaggccatgtattataagataccatttatattagaaattcagaataggcaaatccataaagacagaaaatagatttgtgatttccagaggccaagtcaccatcttgctctgatgatctaatgaccccaaaacttaaacacaaaaatatgatgaaggcaggtacagtgggtaatgcccgtaatccctcccaacactttgagaggccaaggtgggaggatcacctgaggacagtagtttgagaccagcctgaacaacacaggagacctcatctctacaaaaaatttaaaacttagctgggtatggttgcacatgcctgtgggcccagctacttggaaggctgaggtgggaagactgcctgagcccaggagttcgaggctgcagtagctatggttgtaccactgcagtctggcctagatgacaaagccagatcctgtctcttaagataataatgcaaaaaaaaaaatcacatagattcaagttcctagagtagattcacagaaacagaaagtggaatggtggttaccagaagacagaggaagggagaatgggaaattagtgtttgatgggagtggagtttcacttggagaagatgaacatatttgtggagataatggtgatggctacataacattgtgaatctacttaatgccactgttaacttagagttaaaatagcacattttggccaggcacggtggctcacacctgtaatcccagcaccttgggagctgaggcgggcggatcacctgaggtcagaagtttgtgaccaaactggctaacatggtgaaatcccgtttctactaaaactacaaaaaaaaaaaaaaattagccgagagtggtggcgcacaccctcccagctactcaggaggctgaggcaggggaatcacttgaacctcggaggcagaggttgcagtgagccgagatcgtgccattgcactccagcttgggaaacaagagcaaaactccatctcaaaaaaaaaaaaaatttatattatgtatttttaaccaaaataaaggaacaacaaatgcatttataaaaatcaaacgtggctgggtgcaatggctcacgcctgtaatcccaggccaaggcgggggatcatctgaggtcaggagttcgagaccagtctggccaacatggcgaaaccccgtctctactaaaaatacaaaaattagccaggtgcggtggcgagtgcctgtaatcccagctacttgggaggctgaggtgggagaatcacatggacctgggaggcagaggttgcagtgagctgagcactgtactccagcttgggtgacagagcaagactctgtctcaggaaaaaacaacaacaacaacaacaacaacaacaaatcaaatgttaagtttatattttatatgtaatttataatttaatttttataatacattaacaagttttataataaagaatttttaataataaaaaatgtgcaattcttgaagcagagatcctaatgcctataggatgtactgtgctatatccttctgtgtattctactgcatacatcctcaagctggctccatgtccctcatgagaccagggcagagactgatatccccaagcttctcacgttattctgcggaccccttaccactttgttgagttccgggctgtctgggctgttgtcctggaaatactccactgccttctgaatcttggccatgcttcccaggtactcttccagcctacctgtggggctgggaaagaaaagagccaggtcaggctggggcatgggggatgaagaaggactaaggacacagtatttgggaaaaagaaaattaatacaggggactccaggctcaaatatattctatccccccactgccttttaaggcctagggcttaaaaggcgtctcactgtgttgtccagactggtcttgaactcctagtctcaagcgatcctcccacctcagcctcccaaattgttgggattacagaccaaccctcctgttggcccaggaggcattaggaattgaccctctgggcctcactcactcacccctctctgatgatcttctcagtgtcactggccacatggtagtagctgatgacatggtccaggcaggacagcgtcttctcaacattctcctgcagccgctgcagattctccgtctgcttgtgcacagggatgatggagttctccagcttcataaggcggctctcaaaggatgataagatagacacctgcgggagggaagcctcttgatcttgggactcacagtggtcccagcactgcttctacacacccaccttcggcatttcctgccttttctctggttttctagacaataaactccacaagcgaaggaacagggtgtacctgttccccactgtatcttcagcacctatcatgtgcctggcatatagtaggtggtctaagacaaattggttgaaattttatttgaaggcaaaccaagcatcaaattaattcttcttaaaataatcagcccaagatggcttcccttccaccctttgaagccaaatctcaacttctgttctctctgaagcattcctaaaccggactggaagtagtttcatacagagtagcctcaaatgcattgctgtatcttcaaaaccctctctaaggatgaaactcattgaataaggactagaggctgggcgtgatggttcatgcctgtaatacccagaatttgggaggctgaggcgggaggttagcttgagactaggagttcaagacaagcctggacaacacagtgagaccctgtctacacacacagacacacacacacacacacacacacacacacacacacacaattagcaaggcgtggtggtgtgtgcctacagtcccagctgctaggaggccgaggcaggaggactgcctgagcccaggagttagagactgcagtgagctacagtcatgccactgcactctagcctgcacaacacagccagactctgcctctaaaaaaaaaaatttaaaaattaaaatttttagaaaaggactaggactttattattgtgtgactaaatgcaaatacaagtttgtatttactcactttgtgcttttccagtctcccctaggaataaagaaggaaactcacttattgagcacctattgtataccaggcactgtgcaagatgcagtcgcatgcattagcgcatatgaccttcacagacacactgggaggctggcacagtctctgttttagcagatgaattcgctgacaccagttacctatcaggagccgcacatttaagcagaagggcaaggactagatcccagatctgcctgactttagagctctttctttccctaaagtcctctggagtgaaggctgagtcttctctgccctcaggaatctcaaagtgccaacctcctgggcagagagtccactgacaatgacatatgcccagtacctagcccaactggtcagactcactgagtgtttgcagaaggagagaaggaagaatggcgagcttagacagaaagcagcaagtccaggccagtgggaagtgcagcctcctcagtgagggtacggaacatggggagggggctaggcaggagagatgccaaactgttgctagataaacccacacactgcctccgtcgctgcccattccagaactccaggccgcaggaaccggaaccgccaggtcgcaaggctctcccccagggtccggaggcctgccctctcccccagctgcggggagactcaccatgttcttagtgagctggtcgctcttctccaggctgtctcggatgaaggacagagtctcctcctcctgggggcaggcaaggggaggacatcaccagaaaccagaagctaaaggagaccactgcgtcccaaccccacggcctagcccccaaccccatctcctcgctgggtgcgctccctcccacccctgcctcctccatgagtagacaatcaggccccgctgttggcccctttccctcacctcctccccagcctccccaggcccacgcccacctgcttcagcttgtcctcaatctcccgccgtcgagcggatgcctcctgtgggggaatcatcgctctgaaccccgcggctcccactccccagtatctttcctccgcgggcccaccgggcccccgtccccgtcacacccacttccgctcttggtcccgccccgggacgcctgggcggagccatgttgggaatcgcaggctgaagtgcgcctgcgcggagcccaagaacggaccgacggccattttgagcgtggctgggaagagaagtgtattcggatgctgcaagggacctcgacgcgggttccttgcctcagcagaggttttcgatcggccttatgtcccgcggctggcaggacacttagagctcacttgctgttttcgttgaaagaccgacccttttgataaagactgctggggaaggcgacgaattcctttccccaggtcgcattctatgggcaggcaccaaggccaattgcgtttcccacaaagccccgcacggagcaggtgacacagtagatgcctaacgtgtgtccatgtaatgaaccaggggcttgtgtacttgtttccgccttccaccctgcattacgcaaaaacgtatcctgtgggctggcggggctgctccggagctccaggcccagacccagcgtccaactgcagctccaggggacggggtggggggcgcccctggatcaacttccctgcggggctggatgttgtggttgcagacccagctcctgcaaaacctcgagttactccttcctctaacccgtccctgcccaccctgcctctggcccccagccttgagaaaggacaaggccgaccagcttggttcagtccttctgtggcctcagtgtccagacacccggaagatagacaaggaggcatgtgctggtagatgagaaggtttggggcgggcaggggggacaccaagctttttttttcctttcttttcttttgagagagagtctcactctgtcgcccaggctggagtgcaagtggcacgatcttggctcattgcagtctctgcctcccgggttcaagtgattctcgtgcctcagcgtcccgagtagctgggattacaggcggctgccaacacgcccggctaatttttttgtattattagtagagacagggtttcgccatgttgcccaggctagtctcgaactcctgacctcaagtgatccacccgccttggccttccaaagtcctgagattacaggcgtgagcccctgctcccggcctaaggagagaaggagagaaggaagaacccaagctctagggttcccaagcgctcactccacccatagtcacccgaagaggaggaggaggaggaagtgggtgcacagagcctggagagggatgggcagccttccctcaggcaagaggacaatttcaatcctgttgtaggtgggggagataaaaggctgattcctgtgtcaggaaatacccaggatgatttcgctgacatggtccttgtgtagtccaaagggctaagtaggagaaagtttaaactgttagatgtcacagaatagagtagcggggctagttagccgctgtagagagggtgttttgggctcaggtggactacctttgagggcctggtccagcatttaacctgagtctctctctctctctcttttttttttcttgagacggagtcttgctgtgttgcccaggctcgagtgcaatggcgtgatctcgcctcactgcaacttctgcctcccgggttcaagcgattctcctgcctcagcctctcgagtagctgggattacaggcatgggccaccaccctggctaattttgtatttttagtagagatggggt[135 bp omitted]tagatgcttaa[155 bp omitted]caaaaattagctgggtgtggtggtgtgcacctgtagtcccagctactcgggaggctgaggcagaattgcttgaacccaggaggcaaaggttgcggtgagccgagatggtgccattgcactccagcctgggcaacagagcaagactccatctcaagcaaaaaaaaaattttgttttttttttgctccataggtcttgggaatcctttatgtgcgtgaggaagctaatattttcaaatctgtacaatgtcattgcatttttgtcaatcagctgtgtgtgctttactgcatttccttcagtgtctgagtctaatggggttagataccattagtacaataccatgtactgagagtcttctgtttgcctgtctctactacaaacattgcccttgctaatgctcctctaatccttatcataaacctgggagtcaggcccagctgtcgtctcccttgtgcagacgaggaagctccggctcagagaagtcagctgtagtaagtcaacacagctggccagcaaagggtgaggctcaggcggtctcttctttctccccatgctgggcagctcaggagtggtgtttgttatgcaaagctgccaatctgattttcaaaaaaattcattgtgaaaagcatgttgtattcaagacaactatatttactaagagtagacagaatgaaaaaatgaatttaaattattctcaacctattatcaaccttgggttgacaacaaataggtattgattcagctaaaactataatttcctaactatactcaacacgagctactttagcgaaaggaacaagtggtgctttagctgcagtctcagaaatcttaggtctcacatccacaaacttgtgcagaacaccaaggtgccagccatagtcgtggcccccacttcccacttgcagagatgatctttccagagggaggaaaggaggtaagaaggaaggaaggtaggaaaggacagaaggaaggaagggcctccccaccccacaaatgtgttcttcagtttcataacttcctaattttagacttcatgctctgtctgaggaatcagatgtatataattcctccaaattaatgtttcctggccctgtaaccatattgcaaatgtatatgctatgacataaccagaaaagcaggtcataatagtatatatcgagattacaaccatttaacatataacagatgcattgcaaaaaatgactacaggaaaacaccacaaaatactaaagggtaagtagaacagatggaggattctttttttctagtttctaaaaatagtttaaattacctttctattaaaatgcttctgagtcaggcgtgttggctcacgcctgtaatcccaacactttgggaggccaaggcgggtggatcacgaggtcagaagttcaagaccagcctggccaatatggtgaaaccctgtctctactaaaaatacaaaaattagccaggcatggtgggtacctgtaatcccagctacttgggaggctgaggcagagaattgcttgaacgaggaaggcagaggt[132 bp omitted]agaagcctggacaggagaatcgcttgaacccgggaggtggaggttgcagtgagccgagattgcgccgctgcactccagcctgggtgacagggcgagactccatctaaataaattaataataaaataaaatgctgtccaggcatggtggctcacacttgtaatcccagcactttgggaggccaaggcgggcagctccattctttgtatagtatttcactgaatggatataatagattggaccagttatctattaatggacacttaagttgtttccaggtttcttgctattgcaaattctgcccccttggggtagaaaatatacatatatacgtgtcctgtacgtgaccacctttgtatagacatctatatgccggacacattccaagagttgaattgctaaatcaaaacgtatgtatctttataatttattattttattttatttatttaaaaattttttctttttgagacggagtctcactttgtcacccaggctggagtataatggcacgatctcggcttactgcaacctctgcctcccgggttcaagtgattctcctgcctcagcctcccgagtagctgggattacaggcacccgtcaccacgcccagctaactttttgtatttttagtagaggagatg[139 bp omitted]agtctcttaaggataaaatctctctatgctgcccaggctggtctcatctcctgggctcaagtgatcttcccacctcagcctcctgtagctgggattacaggtgctcacccccatgcctggctagataattttttttttttttagatggagtttcactgttgttgcccaggctggagtgcaatgacgagatcttggctcatcacaacctctgcctcccgggttcaagcgattctcctgcctcagcctactgagtagctgggattacaggcgtgagccaccacacccggctaattttgtatttttagtagagatggggtttttccatgttgatcaggctggtctcgaactcccgacctcaggtgatccgcctgcctcggcctcccaaagtgttgggattacaggcatgagccactgcactcggccgataatttttatagatacatacaaattgccctccaaaatggttgaactagcctatatttccaataccaatgtacatatgccctatttccctataccttaacccacagtattatcgaactgacatttttgccaatccgataggtgaaaaattacatctcatgtttaattttggactaaaagaaaatgaaaatatagcttatcaaaatttgtgggatacagcctgagcaacactaggagacgtcgtctctacaaataatgaaaaaaaatagcccagcatggtagcacacgcctgtggtcccagctactcaggaggctgagacaggaggattgcctgagcttggaaggttgaggctgcagtgtgctgtgattgggccattgcactgcagcctgggcaacagagcaagaccttgtctaaaaaaataaaataaggctgggcgcggtggctcacacctataatcccagcactttgggaggctgaggtgggcggatcccttgaggccaggagttccagaccagcctggccaacatggtgaaaccctgtctctactaaaaatacaaaattagtcgagcgtggtggcacacacctgtaatcccagctactcgggaggctgaggtgggagaattatttgaacctggaaggcgaaggcagcaatgaaccgagattgcatcactacactccagcctgggtgacggagtgagactctgtctcaattgaagaaaaaaaaaaaaaaaaaaaaagaggtgagggccgggcacagtggctcacacctgtaatcccagcactttgggaatctgaggtggggggattacctgagttcaagaccagcctgaccaacatggagaaaccccatctgtactaaaaccccatctgtactaaaaatacaaaaattagccgggcatggtggcacatgcctgtaatcccagctactcgggaggctgaggcaggagaattgcttgaacccagaaggcggaggttgtggtgagccgagattgtgccattgcactccagcctgagcaacaagggtgagactccgtctcaaaaaaaaaaaaaaaaaaaaaaaggaaaagaaaagaaaaaaggaaaaagaaatctgtaggatgctgcaacacaaaattaaacaagaagaacaaagctgaaggatggatggacaatactcgactttaagagttactataagccgggcatggtggctcatgcctataatcccagcactttgggaggccaaggcaggcagatcgcttgagctcaggagttcgagaccagcctgggcaacaaagtgagatcctgtctctacaaaaaatacaaaaattagcccagcgaggtgattcacacctgtagtcccagcactttatgaggctgaggtaggaggactgcttaagctca[133 bp omitted]agctccaccccctgggttcatgccattctcctgcctcagcctcctgagtagctgggatgacaggtgcccgctaccacacccagctattttttttttgtatttttagtagagatggg[136 bp omitted]ttcaatgataggaaaataaacacctgattaaaacagagacaaaagatctgaacagacacctcaccagagaagatatgcagatgacaaacaaacatatgaaa[132 bp omitted]ctgcagccttgacctcccacctcagcctcccaagtaattgggattacaggcgccctccaccatgcctggctaatttttgtgtttttttaagtagagatggggtttcaccacattggtcaggttggtctcgaactcctgacctcaggtgatccacctgcctcagcctcccaaagtgctgggattacaggtgtgagccactgagcccggcctttttttttttttttttttttttaaattcaagatcttgctctgtggctcaggctgaagtgcagttgcatgattatgggtgccccagcctcccaagtagctgagactacaggaactcaccaccgcccccggttaatttaaaatttttttatggagacaggatcttgctttgttgcctacgctgatcacaaactcctggtctcaagtctaccttggcctcgggattatgctgggattacaaaaatgagccaccatgcccagctgggacctgcaaatttaaacaacaatgagatgccactacacggctatcaccatggctaaaatccaaaacactgagaacaccaaatgctggtgagagtgtggagcaacaggagttctcactcattactggtaggaatgcaaaatgctatagccactttggaagacagtgtggcagtttttagaaagctaaacgtactcttaccatatgatccgggaatcgtgttgcttgctatttatccaaatgagttgaaaatttacatccacacaaaaacctacacaagaatgtttatagcagccttattcatcactgccgaaaattggaagcaattgacatcctttactaggtgaat[140 bp omitted]ggtgaaaccctgtctgtactaaaaacacaaaaattagctggatatgatggtgggtgcctgtaatcccagctactcgggaggctgaggcaggagaattgcttgaacctgggaggcagaggatgcagtgagccaagattgcgccactgcactccagcctaggtgacaaacaagactccagctcaaaaaaaaaaaaaaaaaagatatactattaagcagccaggtatggtggtggctcacgcctgtaatcccagcagtttgggaggctgaggtgggttgatcacctgaggtcaggagtttgagaccagcctggccaacatggtgaaactccatctctactaaaaatgcaaatattatctgggtgtggtggtgcgtgcctgtaatcccagctactggggaggctgaggcaggagaatcacttgaacctgggagacagaggttgcagtgagtagaggttgcaccactgcactccagcctgagtaacagaacaagactccatctcaaaaaaaagaaaaaaaaaagacatattattcagagataggaaatgagctagcaagccacaaaaagccataaaggaacctcaaatgaatattaatcagtgaagaagccaatccgaaaaggcaacatactgtatgatttcaaccatgtgacattctggaaaaggcaaaaccatggagacattgaagtgatcaatgattgccaagggtttgcggggttgggggagggagacagagggaggaagggagggatgagttggtggagcacagatgatttttagggtgatggaccacgctgtatgatactgtaattgtggatattgacattatgcaattggcaaaacacacagaactatataacacaaagcacaaaccccattttaaactatggactttaaggaaacaattaacaaagtgaagagacaactcacagaatgggagaaatatttgccaactagctatctgacgggatttagtaatgggaatatataaggagctcaaacaattctatgggaaaaaaaatctaataatacaaccaaaaatgggcaaaagatctgaatagacatttcttaaaaggcgatatacaaatggcaaacagatatatgaaaaggtgctcaacatcattgatcatcagagatgcaaatcaaaattataatgaggtattttctcaccccagttaaaatggcttttatccaaaggacaggccataacaaatgctggtgaggatgtggagaaaagggtaccctcgtacactgttggtggcaatgcgaattagtataactcctatggaacagtatggaggttcctcaaaaaactaaaaatagagccaccaggtgatccagcaatcccactggtaggtatatacccaaaagaaaggaaatcaatatattgaaaagatatctatactcccgtgtttattgcagcactattcacaacagctaagaattggaagcaacctgtgtccccactcaaatctcatcttgaattatagttcccataatccccatatgtcatgggagggacccagtgggaggtaattgaatgacaggggcggatttttctgtttttgttttgttttgtttcttttgagacggaatctcactctgtcacccaggccggagtgcagtggcgtgatcttggctcactgcaacctccgcctcttgggttcatgtaattctctgcctcagcctcctgaatagctgggattgcaggtgcccacctccatgcctggctaattattttaggggtaggtttttcctgtgctcttctcgtgatagtgagtaagtctcatgagatctgatggtttcacaaagggcagttcccctgtacacactttccttgcctgccaccatgtaagatgtgccttttctcctccttcgccttcttccatgattgtgaggcctccccagccacgtgaaactgagtccattaaacctctttttctttataaattacccagtcttgggtatttcttcacagtggtatgaaatggactaatacactaagtgtccatcaacaaacaaatggataaagaaaatgtggttcatatacacctgggagtactagtcacccataaaaaagaatgagaccctgtcatttgcaataacttggatggagcaggaggtcattgtgttacgtgaaataagccaggcacagaaagaaaaacttcatgtgttctcacttatttgtgggagctaaaacttaaaagaatggaactcatggagatagagagcagaggctgggaaaagtaatggtggggaaagagggagaaggggggctggttaatgtgcacaaaaatataattagctagaatgaataagacctagtatttgatagcacaatagggtgattacagtcaataataatttattgtacattaaaaataactatgggcggccgggcgcagtggctcacgcctataatcccagcactttgagaggctgaggcgggcggatcatgaggtcaggagatcgagaccagcctggctaacacggtgaaaccccatctccactaaaaacacaaaaaattagccaggcatggtggcggggcgcctgtagtcccagctactcgggaggc[131 bp omitted]gtggctcacacctgtaatcccaacactttgggaggccgaggcgggtagatcacctgaagtcaggagttcgagaccagcgtggccaacatggtgaaaccctgtctctactaaaaatacaaaaattagccaggcgtggtggcgggcacctgtaatcccagctactcgggaggctgaggcaggagaattgcttgaacccaggaggcggaggtttcagtgagccgagatcattccactgcactccagcatgggtgacacagcgagactccatatcaaaaaataaaataaataaaaataactgaaagagtataattgggccgggtgcagtggcttacgcctgtaatcccagcactttgaaaggctgaggcaggcggatcacttgaggctaggagttcgagaccagcctggccaacatggcaaaaccatgtctctactaaaaaatacaaaaattagccagacatggtggcaggcgcctgtagtcccagctactcgggaggctgaggcaggagaatcgcttgaacctgggaggcggaggtcgcagtgagcatctgagatggcaccactgcactccagcctgggcaacagagagagatgctgtctcaaaaaaaaaaaaaaaaagaaaagaaaagaaaaaaagagtataattggattgtttgtaacacaaagaaaggataagtgcttgaggtgatggacactccatttaccctgatgtgattatgcctgtatcaagatatctcatgtaacccataaatatatatacctactacgtacccacaaaaattaaaaaaagatttttagaaataaaaagtaaactatgggctttagttaataataatgtatcaatcaatttgtccatcagttgtagtaaatgtaccacactcattcaagttatttatttatttagagacagggtccagctctgtcacccaggctggagttcagtggcccaatcatagctcactgcaacctcgagtgtgtgccatcacactcagctaattatttaattgttttgtagagatggggtcttgctatattgtccaggctggtcacaaactcctgggctcaattaatcatctcgcctcagcctcctaaagctctggggttacaggcataagccaccacttccggccttgctagttcttaataatagtggaaactgagggacagggagcaggaggagatatatgacaactctatcctttctgcatgatttttttttctgtaaacctgaagctgctctaaaacatgtctgttgggcacaataactcacacctgtaatctcagagttttgggaggccgaggtgggaggatcatttgaggccaggagttcgagaccagcctgggcaacatagcgagaccccatctctataaaaaataaaaaattagccaggcatggtagcatgtgcctgtagtcccagctactcaggagaatgaggcaggaggatggcttgagcccaggagttggaggcggcagtgagctatgactgtgccactgcactccagcttgggtgacagag[131 bp omitted]accagcctagccagcatggtgaaaccctgtctctactaaaaatacaaaaattagctgggcatggtggcctgcacctgtagtcccagctactcaggaggctgaggtggagaatcgcttgaacccgggaggtaggaggttgcagtgagctaaaatcatgccactgcactccagcctgggcgacagagtgagactctgtctcaaaaaaaaaaaaattttttttttaaatgacatctcaggttaaaactgcctgtttaatgcactttgtcctttttcgtttgcttgtttttgagatagggtctagctctgttgcccaggcaggagtgcagtgggggatcttggctcactgcaacctctgcctcccaggcttaagccatcctcccacctcaccctcccaagtatctgggactacaggcatgtgccaccatgcccggctaatttttgtatttttttatagagacagggtttcaccatgttgcccaggctggtatagaactcctgggctcaaaagatcctttcacctcagcctcccaaattgctgggattataggcgtgagccaccatgcccagccctttgtccattttatataatgatg[155 bp omitted]ctgcctcagcctccaactagttgggactacaggtgcctgccacc[131 bp omitted]accatgcctggcctcctatttttaaattttattattattattattatttgagatggagtcgtgctcttgtcgcccaggctggagtgcagtggcctgatctcagctcactgcaacctccacctcctgcattcaagcttctcctccctcagcctcctgagtagctgggattacaggtgcccaccaccaccccggctaatttttgtacttttagtagagacggggttttgccatg[138 bp omitted]gcccaggctggagtgcagtggcgtgatctcggcttactgcaacctctgcctccagagtttaagcgattctcatgcctctgcctcctgagtagctgggattacaggcacctgccaccacgaatggctattttttttttttttttttgtattttagtagagatggggtttcaccatgttggccaggttggtttcaaaatcctgaccccaagtgatccacccacttcggcctcccaaagtgttaggattacgggcattagccactgcacccagccaattctttggccgttaaagaatattatttaatcatttatatgaaaatctttttcttattttttcccattttcattatcatgtgggccaggcatggtggctcacgcttataatcccagcactttgggaggccatttcgggtggattccctgagtttaggagtttgagaccagcatggtcaacatggcaaaaccctgtctctgcaaaaaatacaaaaattaggtgggtcccagctacttgggaagctaaggcgggagaattgcttgaacctgaaaggttgagagtgcagtgaacgttgattgtgccactgcattgcagcctgggtgacagagcaaggccctgtcttgaaaaaaataaaaatatgcggtttaatttcatttattgttgctattttgtgctagtggagttttaattctttcatttgttcatgttttatttatgatttatgtttatcagactttctttcttttttctttttttttttgagatggagtctcgctctgttgcccaggctggagtgcagtggtgcgatctcggctcactgcaacctctgtctcctgggttcaagcgattctcctgcctcggcctcctgagtagctgggactacaggtgcacgccaccat[135 bp omitted]ctcccgaagtgttgggattacaggcgtgagccaccatgcctggccattcatactttctgttttacagctttttggttttgtgtcttgcttagaaaagcttatcccaggcagggcgcggtggctcatacctgtaatcccagcactttgagagaccg[134 bp omitted]gaggcaggagaatcgtttgaaccgagatcattccactgcactccaactgggaagacagaatgagactctgtctgaggaaaaaaaaaaaaaaagcttagcttgggataaataaaacacctgtgttcttttctcgtacttttttttttttaagtttatattactgagccatctgagttttttcgcagtctggataccgtttcttccatgtagatatctggatctatttcttgggtgtattctgttccattgaattgcttttgcatatttcagcaacagtaccaaaccagttaaagcaaaaaagctttttaacttaattattcatttaatatttggtgagggatatatctttcatggttttttattttcccccctcctaaaaaaagtcctggatagtctacttttttttttgagacggagtctcgctctgtcgcccaggagggagtgcagtggcgtgatctcggctcactgcaagctccgcctcccgggttcacgccattcttctgcctcagcctcccgagtagctgggactacaggtgtccgcca[138 bp omitted]cccggcctggatagtctacttttgttctttttttttcaggtgaactttaaattcattttcacagctacaaattgaatgtcccctaagcaaactggtttgaattcaggtccttatagagtctggggcatcactgaggaatcatgcctgcttgaggggtggaggcaaagtgtgagcaaggtgagggggtgctggaagccagaagcttcctgcggagcctgtgaggtgcccacagagcagggtccactgcccggaaggatcactggacctcacaggcagagctggagggaggaaaggctaagccagcagaagccccgctgggggagatcaaagacaagcatgggcaacaggtcttcacagctgagtgacacaaacaagaggggtgccgggccagggctgatggaattgccatgcgtgaccagaaggctcagcggggcctctaaagggcacctccccagcacctggccttggcccgacccagagggtgttcagggtacccagtaaatctatgatgagcaaataaacaagtgcatgaaggctaactccaggaggaggaggaggggcgaggaaggaggatcaaagggatggcgtacacgtcccagggaaggcaaagtgaaggaggtcggggtgcagtattttttttttttgagacagagtctcactatgtcacccaggctggagtgcagtggcacgatctcggttcactgcaacctctgcctgctgggttcaagcaattctcctgtctcagccttccgagaagctaggactacaggcacccaccaccatgcccaactaatttttttgtatttttagtggagacagggtttcaccatattggtcaggctagtctcgaactcctgacctcaagtgatctacctgccttggcctcccaaagcgccggaattacaagcgtgagccaccaagcccagccgagggtgcagcttttgaggcaactgagagcctctttgacctgagaatcacagcaacatacttgtgggcagcagaaacacccaggccaggagatacattgggaggaatctttatcccttcctgcttctcttgtggccagagacctgcacactctgtcccacccccacacctcccataccaatttctcagcttacccaaggcaggttccaggagaaggctgtggggcaggaaggatttgggctctgagataggtactgcggacacatgttcccatgggagaatgttgcacgtggcagctgatttctgtccaaatcacagctgaatggcagagtggaggaaaaagaacccaggtgtgaggccagacaggcccgtctgatcccagccctgcccctaattagccctgtgacttctgaataacacaccacaaaggccccttggatttgaggtaaattaagtgacatggcgcatataaaaggcctggtacctagtaggtgctcaagaaatgttagccggtgcccactccagttcttccctggcctttccagctgtagttggagtacgttaggaacaaaatcggcttctgcagctaatgatcactgcttagaaatgtgttctgagttctgatcaatttatccagaacccgtggaacccctcacctcctcttatctgcccccaaacagtcctgagtcattgacagcatcttgaacctcctggcccctggactcacccagtgaggccattcgtgaagatcaaagaaacgaaatcaccaggcagtgataccagggctggatagtcaccttctggcaccttttagacatctctctgcatcttggtctttccttctgcaaggacaacaatattacagccccccaaccctccccaggcactcactacaggagattagcgttacaaaggctcagaacggtgccgggaacatggtggccccaggagggattctgctggttctgcaaaccccaccgcaggaagacttcctggcttgtaaaatgaaggaaaagcaacccatcaggcgcttgccactcactgcctggctgtcctaggccatggccccttatctgcgccacacacacacacacacacacacactacacacacacacaccacacacatcacacacacacacacacacacacacacacacacacacacacacacacacacacacacacacacacacacttctccccctctccctcacccctcctggctcgacaggggaggagctgggagggcctgtcccctgtccccctagcccagccttagcccctattaccggaggcctccgctttctagaaccccgggaggggcttcgtggacgtggctgtgccgcaggggggcgccctcctcccgccgtgctcgggggtcgaaccccgagcgctccgggagggcttaagcaggcggggaggtgaggcgagcccgggccgggccgggccaggccgggccgcgagggggcgccccacaccacccttggcctccaccgcgctcgcgcagctggaacctccgagaaggcccagggtgcagaggaagggagaggcccaggggccagggtcatgggtggggacagaacgggggcaggagggggcgctgaagagggagggaacgtggagatggaggggaggcaaacaacgagggggcatccagagggtcccgggaacgcgacctgggggttggacaggaaaccaggggtcggggcagcctgctgggggcgtctcgtgccccccaccctccattcctctgaaccagtccggaaggggggttcggctggcaagccgcggtggcgtcagcctctggcacccgctgctgcccggcccgtggctccaggcaaccggggacgctgcgggggctgcgctgggcagcgggtgcgggtgcgggcgccccccatcgcgggcccaggcgttcccccagcaggcccaggagcccccacgggtccaggtgcgcccctgaggcctggctcccctggggccgcgtgcccggaacgtgactcagcgctttctccgtgccgggctgcggtggggagcgggacggaggcgagtggcgctgtccccaggaagggccccgcacaggcccccgccaggcgggatctttcccgggtcgggcaggttcgttcatttgttcacgaactcagcgtcagcgaggcaggaagcgggaagagagaggagaccccggataagaagatggtgctgttggaaacatttgggaatttggggtgcgctgcaggcctgggtcatccaggccacaggagaggcacagggctgcggcctgggttgggggaacagccacagctgtggggcgtttcaaggaggccgaggcacaggcgtatggactggattttgaaggatgggagaagggggcctcaggacaggaaccggccttatggaaggaaagctgggaagtagggagggggccgggggtgtcggagaggacagctgagtgtggcgggagcggaggcagagcggccctggggccccggcgtcagctgaggttgcactgtgtttggagaggagcctcggaggggtgggctgcctggcagcagtggcctgggggccgcaaatgaggagggtgcagtgccttgggcagtaaattagaagacacaggctgctggctgggggcgggagggcacagggaagccctgcccgggagcaggccgagagctaggtttccaccgttccccgccaaccccaaactgaggaccgatggatcctgcccctgcggtgggaaaccaggaggcctctttccctgactggatagctgccctgaggcaggggattgagtgagatgaccctgaagggagtccccagtgtgctcttgttctgtgggcttgcctgtcgttcacactcacggaagggtcctcctgtctgcctgaaatgaatgaatgaatgagcagagatatctcagcgtgtattccctggggggacaccacacacacttccttcttcaataagggctttttaatgaggccagggaggagactgggctggaggtgaggcctgggcccctgagggcagagggacaggcgggacaggcctgagttgccttgctttgcttgccttccttccttcctttctttctctctctctctccttccttccttccttctttccttccttccttctttgcttccttccttctttccttccttccttctctctctcttctttctctctcccttctctttctcgctttctttcgctctctccctccctccctccttccttccttctttttctttttcagagtttcactcttgtagcccagcctggagtgcagtgagctgagattgcgccactgcactcactgcaacctccacctctcgggttcaagcgattctcctgcctcagcctcccaagtagctgggactacaggtgtgcaccaccacgcaaggttaatttttttatttttagtagggatgggatttcaccgcgttggtcaggctgatctcgaactcctgacctcaggtgattctccccgcctcagcctccgaaagtgctgggattacaggcgtgagccaccatgcccagcctcctgagctgcctttctgatagttcccctctatctgcccagctggaaactctggcttttggatctggctctgccagtaagtcattgtgagaattagggtgcatcctgccaccccctatccatgccaccatgctctgctgagcaccaagcatgtgccatacctgactccggccaggtgccacagagaactgcacactgccctcccggagctcccagtccagcaggggagacacagatgctgctgtggtgagtggagaggtggcagacatccacataggtcccccagcaggcagtgcccacgagaagccagcctcacctgtgccaccgtcctcagagctgtgtcctctctgtgcctcattttcttcagctataggtgacactagatggctcctgaggcctcctgcagatgacaggtgcttgctgctgtcattgaggggtactccagctgctcctgcctcccacaaaagggcaaacagacaaaccccacctccggctagcacccctgaaggaatctgggcctgcagctcctcaggaccagacttggagctggggtctgccagaggcccagccagctgatgtggtgtctcccagagctcagggcccagccaaggtgcttcccccaacaaacttgaaccccagccagcagccaggagccccacagtgggcagtctgtgctggcagcaggcgaggggcacgggtcctgggcaggcaggaacagaggccccccgcacttgtcctctgccctggaggcactcaccaggctgcaggggtgaagcagggaaagggattgtggtggaggtcatcccccaaactgagttctagacccaccagctcaaagggctcagggtcaagggtggaccatgggatgtgggctttctggaactctggccagctaggggcagagcgagtgtccggggacccccagccccaactctgctccagccaggcccgctcttctgtgagagaggtggcattgccagagctgatgttggttcaggtaccagcctggggatcccgatgtgtcttaccaaccgcctgctcaaacagaagagccaaaaaggctggcacaagttctgccaggatggcgatgcagggaggaccctccctctgcaggtgtcaccagccgcactgagagaaaaggctcgcgcctgagttttaagacctgggcttggatggcacggtgacacgcaccccgcgggctggtttattttcctccttcccacctcttcacatctccttcaggtgctagacacggagagggccaagagaaccacttgggaaggggactgacaacctcgctggccattgtatggtcatcaataccatgcgcctgctgtcccgggctctggcaggtggggtgtgttgaggatgctgtgggggcccagagcccacacctaacccaggtggagaccaggactggggactctggaactaagtcctgaagggcgttacccaggtgaagcgggagagcgggagggtgctcattcaaggcagaaggcagggattgggacaggaagagtggaaatagtgattctcagtggtgcattagtgtgactggtcacagaggggaggggaggggagaagatgagggatgagcaggagtcagatcttgatggagcttagggggcccgaagctcctcctgtaggcgaaggaactcattgcagttagctgaggagtggccagagcggcacttgaaaagggtcaccctggcccctcatcttccctagcactgagaggctagcagcccctgggcacactggtgggggtcccacctccatgcctttgctcactccccgccttctgcctgaaactcttttcctccctgcactcctgctggatacctgggccatctgtttgaagaatcaagtcaggggctgggtgcagtggctcgtgcctctaatcccagcacttcgggaggctgaggtgggcagaccacttgagatcaggagttcgagaccagcccaggcaacatggtgaaaccctatctcgtctctactaaaaacacaaaaattagccaggcgtgatggcaggcacctgtagtccccagctactggggaggctgaggcaggagaatcgcttgaacctgggaagcggaggttgcagtgagttgagatcgcaccactgcactccagcctgggcgacagaacaagactccatctcaaaaataaaaaataaaaaaaagaatcaactcagggtagtcctgttggacatggcagatatattatacacatgtatgtcttcacttccgaaaccccatgcaagtgaaaagtaaagggattttttttaaacaaagctgtatgacaaaaagccctgtacaagactgttcatagcagctttattcacaatagatcaaaattggaaacaacccagatatccatcaagaggggactggataaacaaatagctaccatcagctgatgaaatactactcagccatgaagaggaacaaactactgatgcatgcaacaacatagttaaattccaaaactaacatgctgagtgaaggaagctgaacacaaagtacaaactgtctggtgccattcataggaaattctagaacaggcaaaactgaccgatggcaatagaaatcaaatgagtggttgcttagggatggggtgatggtagggatcccctggaaaggggcatgaggaaattttctgtgttttgatatatatttgtcaaaatggtttgaacagtacacttaagatcagctcatttaattgtacatg[145 bp omitted]aaatacaaaaattagccagatgtggtggcacatgcctgtagtccagctacatgggaggctgaggcaggagaatcacttgaacccaggaggcagaggctgcagtaagctgagattacaccacttcactccagcctgggtgagacagagccagactccatctcaaaaataaaaaacaaaaaaacatgaatccacaaggaaaaaaaaataaaaaaccagaaggggagataacgtctgatgagagatttcagcaaatctaggctgagaacacatgaagatgaagaggaagtgtcagagagcagaggggccagctcctgggcaggtatgcagaaggggataccaaaaggaagttgaatgatttttcccccagattctgcaaaaggtcagaacacaaagctgaagtttttgcactgagcagatctctagccccctgtcttccccctccctacaatgttcctccccagctccaaccccactgagattggggtttattttctggagcaattgaactgggtcctggaccaggggacactaggcacttgtaggtggtagggatcagacactggggtgaaaacaaggatattaagtgaaagaagtctgcatcttgaaaaacaaaaccccaaaccccttcctggctcagcagccatcacgccaggctcaaaccctgtaggggtaaactagaagatttttctctgagctaataacatgaccttggaggaaaggtctgctggtattgatcattagagccctcctgcaaaaaggctaggttgtcctacaataaagcccaatagttgaccaactgcctctacttgctgaccttgtagttagctttttagcacttcaatttaaaaaatgaatttacagccagtacgactagacatttgagaaaaaccttcaacttgaaagtgagagcttatgataggtagctccaaagtgaaa[144 bp omitted]tactaaaaatacaaaaaattagctgggagtggtggtgggcgcctgtagtcgcagctactcgggatgctgaggcaggagaatcgcttgaacccaggaggcggagattgcagtaagccaagatcacgccattgcactccagcctgggtgacagagcgagactccatctcgaaaaaaaaaaaaaaaaaagaggaaggaaggaaggaaggaaggaaggaatcctgacctcaagtgatctacccaccttggcctcccaaagtgcttggattacaggcataagccaccatgcccagcctttttatttttcttttgagacggagtcttgcgcctcttgcccaggctggagtacagtggcacaatctcggctcactgcaacctccgcctcctgggttcaagcgattctcctgtctcagcctcctgagtagctgggattacaggtgcgtgccaccatgcctggctaatttttgcattttttagtagagacggggtttcgccatgttggccaggctggtctcgaactcctgacctcaggtgatccacctgcctctgcctcccaaagtgctgagattacaggcatgagccaccatgcctggcctatttatggattttttaaaaggtattcatagagaatggcattgataaggatttgtaagactttttgggacatttgtgaataatcagctataagagcacaaaaaatctaaaaaatgacaagaaatgaggtaattattaactcctgcatcctttatgaaaggacatatactcagagtgcactgctgggctctgcagtgagcaatatgcaccacgccatggcaatcacatggtgtctggctgtttaaccaaaaatctgaccaaataggaggatagaggagggaatcgagccatatccttaccttctatggcaggaagccattggataacattcaaataaattgaagatccagcgatggtagtattaattagaagcataaggctgggcatggtggcgcatgcctgtaatcccagcaccttgggaggccaaggtgggcagatcacttgacgtcaggagttcgagaccagcctgttcaacgtggtgaaaccccgtctctaccaaaaatacaaaatttagctgggcgtggtggtgcacacctgtaatcccagctacttgggatgctgaggcaggagaattgcttgaatccaggaggcgaaggttgcagtgagccaagatagtgtcactgcacaccagtttgggcgacacagtgagactccgtcccaaaaaaaaaaaaaaaaaaaagaacagcagggattatttgaaccagtgaaagaactgaaagtggttggttatggttaccagaggagcaggacctgaaggaagagctagtgaccttttgtgtttttttttaaactttttaacatactaagtctttttaagattgatatttatggccgggtgcggtggcttccgcctgtaatcccagcactttgggaggcc[277 bp omitted]actgttatgatgtaaaaatttttccttaaaaaaaaaaaaaaagccaggtgtggtggctcacacctgtaatctgagcactttcagaggctgaggcaggaggatcacttgagcccaggagtttgagaccagcctgggcaaactggtgagaccccatctccataaaaaattaaaaaaacagccaggcgtggtggcatgtgcctctagtcccagctactcgggaggctgagctgggaagattgcttgaacccaggaagtcgaggctgcagtgatctgtgattgtgtcactgcactccagcctgggcaagagtgagagactcagtttcaaagaaaaaaaaaaaaagaaaaagagaaagagacagggtgtggtggctcacgcttgtaatcccagcactttggcaggccgaggtgggtggatcacctgaggtcaggagttcaagaccagcctggccaacatggtgaaaccccatctctactaaaaatacaaaacattagccgggcatggtggtggacacctgtaatcccagctactcgggagactgaggcaagaggattgcttgaacccaggaggtggaggttgcagtgagccgaaatcacgccactgcactccaacctgggcgacagagtaagattccattaaaaaaaaaaaaagaaaagaaaagaaaagaaaaagaatagaaaaagaaaaaagaaaggcccagtggctgttaggtagagaacatactggagcgagggcagtgggctgggagacagctggctgggggtgccagtcccgagtgggggtgcagcgtgaggaaggcccacgcagggagaaggggaatccagccaggcatacggagagtttgaggtgcccatagcatgtttgaggggtgcctgagaggcttctgggtaatgaaggagggttctaggagactcagcttggaaaaggaaccatacctcatgagcaaagctccgagaacaggattcttgccttgaagctgcaatgcccaaacattttagcctcagagtctgtgagtcctatgggtaaggctgtgggcttcccagctcggtgggttagaaaggctccccaagacgaggtctcattccttgttgcccctccctgactcagctcaaaggtctaaggaaccaggtcaccaggtgagtgactgaccagtatccagcagcacctgggaccctggccttcctctcctgcagctgagaatctccggcctccagctgcgtcctgcgagctgggtgcaggtcagctaccctgacctcccggggcccctgcccctctcggggctcctgtccctcctctctgctcctcttgctcctgagtgcccttccaagttactgcagacctgctcctccaccgttccgccccttacaccccatagttccgcacattagccagagctccccacaccctccggttcaccctggcgcggccccaccacctccccatcctcttcctcttccctctccaagaaaggggccggcgcttacccttcctgcctcctctgagaccctcttcctcctgctctcaccaggagctctctcagcactgccaacccctcggggtcacccgtaccccttctttccttcaaacacccccaggcctcccatcttaaagctctccttgggtctgccctcacccctgtccgcacccctctcctttctttctccccatttggagctggagtttgctgcctgctctcactctccccgcaccccaccaactgcactaaggacacagccccatgggaggccgccgggacctccagggccaatgccggcttccgctgcccccactcaggctgccctgcggcgctcagcactgtgggcgctcccttcagggggtggggaacaggtgtgtgagcgcagtggctccccctgcccgagttcccaggcgtcctcccgctccctctcggctttgcctcctcctccctggtcccctggtttcctagtggtggtcctcgttctccgctaccctccctctgttctcacttccacacgagaggcccccaaatccacagggtcaacagcctgcccccctcgctcaattccagaacggggcagcaatggggctttcctccaagttctccctgggctgcaatgccttctacctctgcacacccttgggtcaaaccactgcctccagaggcctcgggaatgttcccagcccagggactggagaacccctgggtgttgactatctggcttctcggctgcttttctatcttgtgttgatctgccagccagcacatatattcattcatctattcaaaaaatacttaacacgttgggggctgtgatgcttcaaaggtaggaatcaccaagacaggccatcttcccacaggggtctgcagacctgtgggcttagtaggtagggtctgtatcccagtccacccctccttttcccctgcccaactcatgggcacagttcactcgaaggaaattgaaggcactctgttgctcagtggggatggggacagggcttggtacccagggttaggcaggaagagaggcagggcagctggtaggggtgtgcggggctgtagacggagcctgtgggtggctgggcaaggggagagctgtgggcagctgccccacctcaacttaattccctgggcaaacagcagcattgggaggcctgcccaccgcaatcccgctgcggttctggcttcaaagggccctgggggctgtgggcggggtgggcttcgtggaggtatgcacaccctctccaattcctggaactcctactttcctgggagcgcgggtcctggggctcagacctctctgtcctcagaacagggtggtgcggcccaagggcaggtgaggggctggtgggagtcagttcagggctgtactggaaggctatcaggggccagtagggagaccctcatccccgacagccccttccgttacggtcccccaacctctccttgccctgccagctcaggctggctggcttctgggggacaatgtccttccagttggcccctgccaacttctgacgcaggcagggaaggttcaagccccagcatgcccagaagctttgacctgctcacctgggagccacagagtggggcagacacaggtgccccgggaagaatgcagcccctgagggccttctgcgcttcacctgctcctcagctcacaccagtcagcgaggctttggcatgcgggggcccataaagccccctcccctgcccgaggtgccgcccccatcctccccccccgcccgccccggtcacctgtgttttcctcctcaccaaacaagaatgtgtcagcagggcccgggctcctcccccaccccattgttaacaaggccggctcggcggccccttcccacatccccacccccgacaggcccaggcctgccccaagggaccagcccactgccccctgccgggagcgcacctacacctatttacctttgggcctcagcccaggagggagctgcacctgaccctccaccgccccgccttctttcctgccctccagctcaccctcttccggcaagtctgggtcctggggcgggggaggaggtggagaaccattcctgactcctgccccagatggagctcagctctgcagggggcctggtcagtttgtcccagcggagcataaagtgcagggttgagggggatccctggggaccttccagacctgagagtcactgggccctgggtggcctgtcctatttaacaggatgtgccctgggcagggacggggagccatccaaggtctgagctcctggcctttcctcccacatcctggccctccccgctctctccatcacattcctagctgggggatacagctggaagacagaatggggaagaggctggacattctgggacagaagggtggctccgtgctttgggaacaggctttccccaacacttaaaatgaggtggggctgggcgtggtggctcactcctgtaatcccagcac[133 bp omitted]gaggcaggagaatcgcttgaacctgggaggcggaggttgcagtgagccgagtttgtgccactgcactccagcctgagcgacaaagcaagactctgtctcaaaacaaaacaaaagaggtggttcaggcaggggctgtcacgtgcagcaggggctggttaccccaaaagtggagattgcaggttagaatgaaaggagatgaggaaccggccagggaacttgagttatgagctcaaagccacacagctccaaagagataggacagtgaatgaacggtgatctcggattgggatgctggcacagggaggagcgtgacggggcaatctgcaaagtttgaatggggtccgtggattagatgggattaccaggccaatgttaatttcctgttttgtgttgttttgtcttgagacaggatgtcactctgccacccctgcaggaatgtagtggtgcaatcagagctcactgaagccttgacctcctgggttcagctcaggcgattctcctgcttcagcctcctgtgtagagagtagctgggaccaca[148 bp omitted]aaccccgtctttactaaaaatacaaaagcttagccaggcgtggtggtgggcacctgtagtcccagctactcgggaggctgaggcaggagaatggcgtgaacctgggaggcggagcttgcagtgagccgagatcgcgccactgcactccagcctgggcacagaacgagactccgtctcaaatcaaaacaacaacaacaacaaaacaaacaaacaaaatccagaagtgcccttgttttaaggaaatacttactgaagtatttagtggtatggggagtcaggtcttcaacgtactgtcaaatggtgcaaaacatattttggt[137 bp omitted]cgtggtaaaaccccatctctactaaaactacaaaaattagccgggcgtggcggcgggcgcctgtagtcccagctactcgggaggctgaggcaagagaattgcttgaacccggtggggcggggcgcacaggttgcagtgagctgagatcgcgccgctgcactccagtatgggcgacagagccagacgactcaaaaaaagaagaaaaaaaaagaggtaaatgaacatctttttacgaaaaagccaccccactgaggggcaaggcaggggtgaataggagtgaggagctcctagcccacactctcgccactccccagcttggcctgctgaaagtcatgccctctccagggccccctctcggttttgccgcacattggaaacatctggggaccttacaaatgctgatgcctgggtcccaccccggaaattctggtctaattggtccagggtgcagcccagcagtgggatttttcaggagcctccaggtgactgtcaagctggggcaaacctcgatctgcttctcaggcctggtgctcccccagtggggtgtcctgcctgccccagacattgccccccttccccccagcacaggcctggggcacacagctacacgcccagcctgtcagtccaaagctggaggctgatcctgtggggagaaggctggagcccagcttgttcccccattgctggggtccatggagaggaagggggcggacagtggggaaaaggagaggggagttgcttgcggggtgaagggaattggggcagccctcagcctgccttcctggaccctgcaggctgcgtgccctcctgcagtatttagaataattagcaagtgaaagcagccggttagcaggggaatgccaggttggcctagagccaaccccgaggacgaagaaagaaaggggctttgggagaaaggggtccgtggaggctgggcaggaatgcttgggacgttgcctgtttgtgcccctgtgtgtgtgcgcccgtgtgcgaggaagtggctttctggaggcgtcgtgcacccatgagggtgtatatgtggcggggactgagttggaaggtggctcccgggcaaagcaaggggggcgggggattgaaaggtgctggctgagtgtcacccagacacaaatttcccatgcctcagtttccccatcagaactccggtagtctggttcctgccagtgtaggtgggaggggtgggtctgagctcactcccttccctggtggccttcctcctctccaaacctgcattgggccaggttgtgtggcaagtgggggccctggagctgggtccctccaggagaggaccaagcgagggaggtgctggagaccagcccaggccggggatggctgactggggcaggcgggcccgggcaggccctcgcagtaggggacagcaggggccgagcccagggcacacttagcctttgagattccctgggtctggggactgaggccactcctcctccctttgtctcctgatcccccagggctgtggaccccagtctccccattgcacagatggaggcactgaggcctaggctgcaggggacaaccgagagccacccctcagccccttcctccccggggatgctgaggtcatggggagttggttagtgctctttgcaggccgtaagtgcccccgcatcttcctctcagccatccctccctccagcaaagagaagcgctgcctctccagaacactgagccctcacctgttcccaaagaaagttttgagcaggtccatatttagatttttaaaaattttatttttaaaaacttttcattgtaaataactttcatgaaaaaggttaaattgccccacggggcaggagggtggatgtgggacgcagcccagggagtccgggtggagcaaggcacgccccacgcccccgaggagtgcaggcaggggcgtggggtaccccgcttcttggtcccagtagttccagcaagctcggcatccctcccagttaagcctcagctacagctacactcactacattagtctgtctgtcctgccccatacagcttggctgccccggcccccaaaccaccaaacccaaacttccagctgctctcagcctcaagtcgggcttaaagattagggatttacgtcccctccccgccccctagggatggggccaggcaaagaccccagaggccttagagaggatctccttgccccaccctgtgccaccacctcattttggtctcctctctctgccccctcccccagtccatcttctgccctgctccgccccatccacagcctgccccggccccagggaggctctgccaggagaagcctccagggggttaatttgctgtcatctaattagcatttgttgtacctggggactctctctggatagagacctggggaagcaggggggaagcggaggtgctctgggagggcccagttctgttcctccccagcctgacccgggctcctccaggcctcggctctcatggtgcagggtcctttagccggtttctggggctgggaagacgcggagcaatgaaacactgtgtgtacaaggtggggctggggagaggaggcagcgattctggtcctgggccctcgttttcagcctcctgggcttgaatctgatggcagctggggctggtggccatgtggcctctggggcaagccttggagccctggcccagcccctgcctaggtggtggggtgtctgtggacctgtgttggggggcagttctggaccctgacttgggcactgtccagaggtggggcagggcctggcctcttacaagaaggcccccacgctggcccagtcctgcaggtcggaggccagggtggcatccccagcctcaaagaggggctccgggggcaggcagccactgccgctctcgtcccaggggtgctgcaggaaggatgtggccaggaaggtctcatcgaagtccaggctgtcggcagcctgctccaccgaaggcccccaggtggcagggcagtcgatgtggcggccgtggatggtgaggtccacgtccacgtgtgaggcggggctcagaggcgggctcagctccagggcctccagtgcacccagctccccgcccagagtgccggcgtcgaagatggcctcccagtcaaagttgcctttgaggggttccagctcaccctgctcctccggggtgggcagcagggtgctggggggccgcgggaccttggccacccgcttgggcagcggctgtttgcgcttatgccccagcctgccctcgcctgcaccccagcccgcctccccggtggcctcctcgaactcccgcagcagctgctgggcctcggtattcaccgtcagcggcccggcccgggggacagcgctgggctcctgcgcggcctggcgggcaaaggctgggtggatgtggacagggggcagtcgccgcttcttgaaagcgccgctcagtagccgctccgcgtactgggggtcaatgcgccagaagccccccttgcctggttcgtccttctcccgaggcactttgatgaagcacttgttcagagacaggttgtggcggattgaattctgggtgcagggagagagcaagagagagaggaaccgctaggtcagtggggacggggagatgaaatggcacctggcgctgctgcgcaccccccatcttttctctggcaggggagaggagggggggacagacacactggtctgcccaggcggctgcagctctgggacaccagccacagggcactgggagcccggagtgctgtcggaggcttttgttccctgttgccgggatatctgcctgctcagtcatccgagctctgagccgcagggtggctctcggtgccacccccgtcgcctgccctccctccctcaccctgccgctgacagcctctggccaaagccctcggctcccccagggcctggaccaccgtctccctttgcctgggcctggctggccctctctgtgagtgagtgggtccagggagggggctgggcagccgagagtggagaggaagggggagagagagagagagcgcgcagggatgagaggtgggggatctgatgactttccttgtttgttgagccggctgctggcctgggccttcaccccccacggccccctccccccactccaggctcagttgattattacccagccaagagctaagagcatagcactcattcctggggcccgtttctcgaagcgcagctgcacaggcttagggtagggtggggctgagggtctctgctttttcggtgcagctgcaaatgaccctgctctagggtcaggggcattggaaatggcttgggactgcggtcctgtggcctgcccgctttgggtgcttcagggaagagtctgggcgtccttggggggcccctgactccaactagcccttgatggtgatggctgaagactcttagggcactgcctacccagcctcaaatccaccatcctcctgccttgtccattcttaggtgcttaatcttgtccaaagcctgctgggggacaggggtcctgggctgggacggcagggcaggtgggtggataatgcccggcagcaaggctgggatgtttacatggtggcctgggccccttggctgctcagtgcctggttccagagacgtggaacacgaagtgagtgtggtaggcagagccccagtggaaggcacctggctcaggtaattgtccccccagggaggttggctgacagcgggggttggaggcaggaaactgagcagaggttgaggtggggggctgggacagcagctttaggaaggccccttaccccctccaccctccattgggacacacctggccctcacatgctaaggcaccccttccattccaccctccccaagccaactgcaaaagggcaggacgtagagcctggcagggaggccacgttccagtttccgtttctgactcccggccccgacaaaccatcccggggcagggcagtgtctaggaattctaggacttgggacaagaatgcgccttcagttcatcgctctccccaaggagattctgtccacgcagagtctagccctggtctttggcctgggcctgctggatgaatggcaggttatttccccttgaatctcagcctctgcacccctaaagccctccacctctggacattctcccttctctctctctctctctctggaagtcaaaggaggggcagttgcaagaactgggctcctttgcagggctcccttctggggcgctggccgcaccgcagagcctacttggcctgcagatttgggatatgaatccagtgcagcgtggggagcgaggagggaatggggagggagcggccgccgcccgtgcctcctctacctgccaggtgggatctgcgtggcggaagtagcagaagttgtccgtgatccacttgtagatggccgacagggtgatcttggtggccttgctggcctgcatggccatgcagatgagcgtggcatacgagtagggaggcttcacgtgcggattggtggcgtagtccacgtcgtcggggggtggggcctgcagccccgggggcgcgctccgcgacgtgcacgacgacgtgggcttgcccggcgtgtgtggctgccccaggcaggcggggtcggccgccaggggggacccgggcgccgctgaacctggcacctggtggtagccgtgggggtcggtgccccccgggggcagggcgggggccttggcgttgagaatggagaattcctgcagccactgcaggctggtcaggctgtcatccagggcgtcgggctcctccaggccgccctccggcccggcctcctccgccggcccggctcccgagaggcgcagccagctctccgccatgtctgcggggactctccgagggggcggtcagcatccacgggctgagccgggggtggcccgccgcgctctctggcccgctgagtcccgcagctcccgttacacggcctcccggacgcgcgcttccatctcgcgaccccgggggcgcctcctccgaataagtatgtggtgcctgcgaggaccacggtgggagctgagcactaccccacccccgaggggacagtgtgtgtacggggacgccctctctaacatcatccccgcagctggggaggatcttttagtgccgaggtatgggaaacagaagcaaggccctggggtcccacccccatcagatctgcctccctcttcctttcctcttcgaggttttattagccaaatgaagagggtaggggcatccgaggctatccttttctcccgaagagcaggaaatcaggacccccttcctcctcgcaacaaatggaagtggggcgagaagtttgggagggcggtacgacggggcgggggcggtggaggtcctctgatccttgaaaaggaatattatgataggggatcattgggaaggaaggggacggaacagtaacggggggcaggaggcgagtttcccccagacttctccgatgtcagtccctgggcccaccacttccgttaaggacgaatgagagagcgggttggtaccgttgcccacccttccccctggcctgcagccctccccatcccttacctggctcagagcgcagcccgggccagaggaaggttctggaagaagttgctcccaccccctgcggctctctgcccccagctcgggggccctgccagcgcctcttgccgcccccccgcccgacggcgcttctctgagctaccgcggccccgggaccggcattaagtagccgctccaaaggcttctcctgctgccatggcgacgctccgcccccataaacagcttccgcctctgccattggccagcacgtctccaaggagaccgcgggcacttgccactctccctggcggcaactctcttcgaactccctccttctgccgccctctcccgcgccacccaaccccctacccgccgctaagtcccggctcggctcattcccgcccgagggccccgcgctggggtcggagaagcgcgcggcctgcggcaccgggaaccgctatggatccgttcgttctggggaaccaagactctcgcccccacccccttcctgtcccgtacgctttgaggcgtcgactgctcctgggacggagcctggggttggggggctaaggctgggagcgggctcaggctcgggaaccgtatccttgaggttttctttcctctccgctacgagtggcactttctcatgtttctgcagcctttccctctcccccgactcttagggtctttctctggtgtcccaggcaggtctgactttccgatgccacctgccgcttacatccacagaggcggcagacacaccaagggggtagggtaatccagtgtgtcccagtaagcagctccttccccacccgtatcctcgaggttccaggaagctgacattccagaggcttctgcagaagcgcactcactcctctggagacagctgatgaagcagagcccgtgggtaaaactctgaagtcatggacttgtcaaattctcctagcggggtcatttgcccaattaatttcaccaacctttaagtcacagggattaagagtagagggactctggggactgtgtcccttcctcctcccttcccctggcctccctcctgtcaccagctttcctgctctttaattattgaggagctgcagggttggacgttctccggtttaaggcggctgcagaggcagtggtgggggctgggttgattaccccgcctctgcccaggagctggagagccggggtcggggaggctggtgcccagaccatgaagaaggcccggctatggcgcatcactcccccgccaacatgcctttccctagcccttgcctctcccactcctccaactccagatcctcttgagtaaaagtattaaagagtgctggcgaaagtcagacagaaactttcacagataagctcactttgcagttagctctccttcccttgtaaacagttttattcatttttaagaatcatgcagcaatccataaatattgcattcttgatgtccccactgtagtgtgaccacaagtgtactccagggagaggggtacacagatggcacaagcagtatacacatgcacacaccaggtgtgcagaccaaagcaaagtgagcgaccagcgtgctaaactccaggtgggcaggaccccaactcccaggtgaggtgggcaggaccctaactcccaggccagccggcttagagtgtggtggtctgtgcccaggagatgcctcagcgggggtagaaactctggtgggatggagctgggcagaaggaaaaaagggctctgtgaggaagccgggatcacaccacctgaaggcaatagggagagcacaggcctagtgcagcaggaaggagccctgggtctccatagttaggctgtgccctgtgggagaagccaggccccacctcttctctttgggtgaactgttgacgtgactatgtgactgtctccagatgaaggactggggcaaaagggttggccactgacctgtcctcatcaggctgactgaggaccagctccttggatggagtatttctgtgggccagagagctaaatgacagccaagagaaggcagggggagggaggaagaggagaaatagtaactgagaaacaagtaaaggacatttctaacctaggtatgccttggacatgggactgaggccttgaggaatctttccgtgcttctccctaggagaggactaagcacctgctgcgaggaaggacagggatcctcaggaagggggtcctggccactgtggctactgtttacctgaatctccttcatctcagctccttcctccctcctcccaggtaacaccacactgtgaatactacctgcaggggacaggacaggaggtggtctgtgtgccaccaccccagggtaagggaagctccctgtcacctgctgcttctgggctcatatttcagggaaatcaggaagtggggttattgctcagcttatgcatcttaactatgaaaggggcgggaagaatgtagggggaaggaaggaaagaacattaggtggggcctgaaatggtaaagtctactgcagtttttcagagagggttggacgacaggcccccctctccatcagggcaggatgtgagccacaaccactaggcagtgagacagtcactgcactcctggcctctgcagccacacagaaacgaaggaccccctgggcaccaggctctttttgaggctgccttggaaacagccttgaatttttttttttttgtttgagacagagtttcgatcttttcaatcttgtagcccaggctggagtgcagtggcacgatcttggctcaccgcaacctccacctcctgagttcaagcgattctcctgcctcagcctcccgagtagctggggagggcccttgaagtgaaggccctgagccctgattccaacctctgctcccagcacactgctgctggccacatgctgctgcctgaacttagctcaaggctctccatcacttcctttggggacctgggcaccaaactgagaatcactggtccacatttctctcaaccattaacaaaagggggtagagatgggggcaacagggacaagaatgccacctcccaattgagtgaggatgaattatggtaatatacgaccactcctcacccagtgcttggcacacagaggtggtcaacacatgtgtttcttgaaatgtcaccttaggatggagttgcaggcctccctgaatgcacctgatcaggagaaatgctccttaagggaaatcatcttaactgggggattctcagattcaagggctccttctttttttttttttttctctgtcgcccaggctggagtgcattggcgcgatctcggctcactgcaagctccgcctcccgggttcaggccattctcctgcctc[224 bp omitted]actggctctgccaccagaaggaaggattgtttccttcaaccaaccttttggttgctaccatttcttgtccttgagaaaggtgctcctagtgcttgtagagggaaacgctacgtccgtgcagtatggctctccctttccacaggagcgatcctccagccctaccccaaactgcaggtttccaattggttatgatgtgccagagaccaggaaatgccagagggatgtttgtaacaaagctgccaaactctaagccttcttgttctaccccctaaggagaaaaaagatgtgtaagaaattagcccatggaccccagctccacctgaacatcaatataccgtgaggacattccagagtccctgcaaaaggtctcgtgagctgcagttcattgagtggctttaggtcacacggagaaaggagggttccagttccctctgagaggtgagggattgtggttacaggttgtaacagctgtcacaggagggtaaaaagtctccagcatcttgctgaggatgcccagtaggcagcagctgagtgaggatggatggaatgcagggcaggaggggagcccaagtgcagaggctggggctcagacagccaaagggccccacacacagggcctcgtctcagagtcctccaggctgctggatgacaagcgccggcgctgggcattccgactgacggcattgtcatcagcctgccaggcacctggggaagagaaaatgaacattacaggagccagacctttggccaaatccagatggtgtctccagcagggcagcccaggagccggcacggaaggagcaggatgcgtgtcacctgagactccgatgacggtgcgagccacagcactcgtgtgtgagaacggagagaagcaggtgctgacaggtgcagagcctgctcctgccccctgggctaggtacagtcactgccactgtggctcccggacagggagggacatgaaagatgttccttgttttgcgaacttaccctgggatccacttttgtattttaattacttggttttaaagtttgcctatatgttacaatagacaggaaaaggaaattgggccttgctgagctattttcattggggcaggaagaggtggggggaagtgagaagactgttcgttctggccgagtgttaatgttttctgtgggggcccaggcggggcaggaaaggactggccacccagcagggttcctgggatggaaggctgcctggagggaggacagtgtgaggctccagtccccgtcacctgccgttttcctctcctcctgcacctacgcagctgttgaggtttgctactagctggtgccatcagcccagcagacaccagcccaagagcctcggggtcccacagataccatcactaaacgcatccgctccccaaatctgctgctgcccccacatgaggagtgccagcgcctgtctggaaacccattcttggtgcttctctttcccttgtgctgtggatccaatcctccacagcctcctgtgggctcacttcctggccgtgttgtgactccatctgtagtcacgctaacctgggctccactcccagtttacagcagtgtgaccttgggcacatcagtttactgtgggccttggttttctcacccatcagatgggacatgcgtactgacctcacgggcttgctgtgaggactagatgagagaatgcgagcgttggtgagtatctgactcctagaatagcctgtgctcaggctcctccaggccatctcgcctctcccctgggagtcctcttcatctcctgcccacagatgagctcctccctccagtgccctccctccagtgaggctagggcgctcctgccttgggcctcggctgcctccactctcagggtcccctggctccctggggtagggaaggcatgtcgtcctccggaccctgtgggcctccccagccgtgtctcccagtggcctcccctcacgaggcatctctggccgggggaggcccagtgtgctcctaagtgctccctgcagcctgaactactgctccacgcacacgtcacatggcagaaaccgctaggtcctggagctcctccatgggacaaagctcctcctgggcaggggccgtgacttcttcactgttgcagtccagagcccagcacaacacctgacccataggaggacctgttcagcggacaaggccgaccaactgtagagtgtggccgtgaggttgagagaggccactcacaagtgtccagggtcagcctcaggccagcccaggacatgaaaccctttaatggcatgtagagtcaacaggtataaatggcttatttccatcaatgccttggtgtgctaatccacctcaggctctagtaacagtctctggtgcttgaccccaggggaacagtgagaacaggagagtcttggatctctctctcatatccaaactgaatttgggatctttactccctgggggtgggtactggagcctgggacatgagtcaaggtgttttttttcacctctaatggtggcactatgtgtctaagtgtggcaggataaatataaggcaatattaatattgcctttaaagtgaagaacccaaaataaaatgagctgtttgttcatttatataatttggtagatctcatacctattcctcaatgtttatggggcaggactccggagctgcggctgttcagtaggaaagaccaaaagcaaatggtaaacaagagagaagacacacatgcatgcacaaataaaaacagcagcaccaccaccaccaccgccgccgccaccaccagcaagccatggaatgctgggccggagaggctgcccagagagctgtcctgactctgaattcacagaagtccttgctacaaactccaaccttctattctatagaagccttagccagggcagaacatcggttacttgtggaagactcaagaatcagatctgaagtctgctctcctggcctcttggtatgctctgtggtgagggagatccggcagcaagcggggggcaccttcccctggcaaggaccctgaggggcccacggcaaagccctgctgctgctccctcctcagcctcattctcacagtaagcctgtctgcggaaagtcagtgtgggtgctgaggggccttccagagcaggtgccgccattttgtctggctgaatccaggcccctccagccaaaaaatggagcacagagattcaaaatccttagagggaaatggataaaggtgctttccgttcatgtctcagtttttgggatatcaaaaatgggagtatgaagagacctctagaggtagattttgggagtacattcaggaaaatttcacaagcccctttcctgcctctacaaagccacttattaaatataaggactgtaatagttcaactgtctttgtagagttgctctccaggggaaggagaaacttagtttgaaattttccttagtgcccacaaagtgcaagtagcatcttagtcttgagttttgaggcctctcaaaaagaggagagaattcaatttcaggtctccacaaacctttttagatttcactggatatgctcattccagtggaatgcagtcatttaaaaattgtattggtatttccactaaaaagatcc[131 bp omitted]gtcgcagcctcctgagtagctgggactacaggcactcgccaccacgcctggctaatttttttgtatttttggtagagatgaggtttc[132 bp omitted]tccatctcagcctcccaggctggagtgcagtggtgtgatcttgactccctgcaacctccggttcccaggctcaattgatcctcctgcctcagcctctcgagtatctgggaccacaggcgtacgccaccaagcctggctaatttttgtattttctgtagagatggggtttcactgcattgcccaggctggtctccagctcctgggctcaagtgatcacttgcctcagcctctcaaaatgctgggattacaggcgtgagccactgtgcccggcctatctttgcctttttccatcactgactaccccagggccttcatagaactatcacttgccacgatgactttcctgccacctatgtaacagtctgccaaactcctcagagccacatctgcttagcgtggtctcgcaattctagtcttactacaacctgtcacacccatcaactgagatctccttcctttattcctttcagaaggaatctcagaacacactactccccagtgaaaaaccaaaaatccacccttggtcttggggccctggaagacccagaagcttcttagggggagagggctagaatgacaaaagtgcctctaagcccctcaccagtgttatcagagtggtgaggacgggaaccaacaaggttcgcagtccttgccaccagccaggtctcctggcagagcccgtgagcaaggtgcagggcacagggacaacatgggatgcagcccgggctccatttcccactggccctccatgaagggagtggcacccacttgaagagggaaatagactcaagcagagaccaggcgcatgtgcagctgttctgacgggagagagctggccacaggagcaatgaggcgccaagacggccagtggtatctcagccccaggatagaaagctgaacttacagctgagtgtgaagacgcctatttattccacgggacctaccaaagtggatattcctgtctgtaacctagcagacacttccagagagttctccagcaaattttctgccagtgtgatgctaacagtggaagcagagacacattctgcctagagagacgtgcttttccctctcaagtaaaaaggcaaccagaggttttgagacatcactttcacccaactactgaccaaggatgccaattaaaaacaaatcatggctgggcgcagtggctcacacctgtaatctcagcactttggggggccgaggtgggcagatcacctgaggtcaggagttcaagaccaccctgaccaacatggtaaaactccgtctctgctaaaaatacaaaaattagccgggcgtggtggcgggcgcctgtaatcccagctactcaggaggctgaggcagagaatcacttgacc[135 bp omitted]gaagcgttcccatttttactgaacagaaatccatatagtctcacacatattttttttcttggaaaatcttagtatattgaatacagcccctcatcttgaggcctctggtgaggatataatgggacacttaacatgcctatacctgaggccctctcccgagagccaacacaggcatttgatttcgtgtctggcacaaactgtgagcccaccataatctctaaatagctggctccacaagtcaccctagggaaccccagggcttctctcttcctcccagtcctcactctcctcccatgattccatggagtaactatcaacaagcaggttagctggagggagtcaggaagaggaggaataagctgtttccactagcactgttggctaaaacaactcccagcagctccctctgccaaaaaaataggggtgggtaagggagtcccttgagggaggcaggaacctaaatttctctcctaaagccaagtaaggggttgaccagggtagagctgcctcagacacagggcacagctaagaaagagacatcatcttcacccaactactgacagaggatgccagttaaaaccaaatcctttccatagcccttgccacagaagcattcccatttttgtaaagcagaaattaatacagtctcacaaatattttttctcataagctcttagtaccctggatacaggcccttgccaattaggaatgggagccttgctcacagccccacgcgagcgcctcccaggtgtgtgcgtgcccagcaagcttggacggggtgaagcattggcagggaggacagtgctggcacggagtgaacacgaactttcataccaagtctagagaacatacatgagtttagaaaataaacaaaccagacagacagatttacatttggcaaaatgatgtgaaacacaaatggacagatggaagccaggccaggagcgggaaggcagggagtgaagcagcccctgggccccagcagctccagtccaggcctaactggcaggaggctggccccgtggtcaacgctccctcctccacgctcaggcaggaagggggtcttccctgggcctgcgcaggagaagcaggggaactgatactgcctcttttggtctcactgaaaatgaagaggcctgggcagtgtctttagaacaaactaaatagaaaatgactcaagaaagccctttgaagggctggagaaagtatctctagagaattccagcttcccctgccacaagcttgtgtggggccagagtgtgcttggactgtgtcttgcacaggctgatggagagtggcaaccacagaggtcgtgtggctccaacgcctccagccacgtcgctgagcgagtaaagcactggacccgtgatgtggctgttctgaagctgaagtgagtcttcgttcagggaatgtttaagaggattcaaacaacacgatgtgaaggacaatttctgtcgtgaaacccggaggggacatttgactcagtccgcttgggcaagatgtggattttagaaaagcagtttttggagcccttgaacgggcacactaactaaaaaggcactcggtgcttaaagtgtgattaacatgatcctgtgtaaggcattacctagatttggtttagcatcatgaggaggaataaggggcactctgacaacctgatcacctgtgaagttacagctccagggagcatagaggagccctaactcgacctctccgttgggatccaaatccagtagtatgtacaatgcaactggtaacccaaagctcactggatcacagagccattccctagcctctgaaacgctggctttcacattcctctctgatcctagctgaaacacatttcttctgaggagctacagcttcacttttaaagggcgcaggcaatccttccaagaccttcgtagagaggtggtgtctgtctgctcaaacttcctgttgatgaaaacaagactgggccacctgacatggtacctgcaaggccgtgatgtggggtggagagtggttaggccaaatcgttaagttttgcttctttcttcctatcctaatactctcactcagagcaaggctggctcattgcaaaaagctcaaggactctcccaggccttcttacttccttcagcaactggtctccagcactagcacaccccaggccttcttggcaggaactgcagggcaggagatgggtgtaccagggtgagagcaggggtaagagcacagggatcgtctcccaccaagttcatgttcagcagactgacactcaccaggtaagcagacctcagagcacagcttattgtccagtgctttcacgcttgcgatgtcaaagtcattgttattgtcacactccatacctagaaatgcgcacgtcctctggcctgtaacggagttaatgcagttagagaggggctggctgtgtttttctctgcgttgctgtccttaaaataaaaatcttaaggatggagacaaaaaaaatcaaatcatatgttaaaaaaaagacaataattaagcggataaagagtggacaagaaaggaatcacgttgtgtgggcatgtctgtgttctcgcgctttcctgctgtttccctagagccctttctgtctgctgctccctaacaagtcagatcactgaggagggctgtgggacacaggctcaacagagaatactagagcgagcagagctgggcagaggccaggctggtgaggctgcgaccaaccagcagaagctagggagcgccagtggggaggtcatcctgctcatgcctgcatctgccttgggtgtgagctgggtgtgtttaggaccacatggctctgcaaaataagtacatgaaacaacaactaaaggtcttagggtccataattttgcatatcaaatcagaatgactacattcacaaaattatgatttccttctttatgagacctgagttgttattttcagtgtgttttaagtggctaaccagaaatctacagacatgtaagaagggaagggaaaagttttaaaagttgttttttatcaagctcccctctttttttctcagtgaaacagagagaagaaaacaaatccattccacgggctagggaatgtcggtgaaacaacctggccacaccgcacttcttagaagcaaatattctatgggagaaacaatcacaaggggtaactctagagcctcaagcactgaagtcatcaactgagttggtgacactccaaacccccttgggctggggtgcaagagctgacggacgcagccttggcggccaccttctccttcaagctccttggccaggtgggagccgtcaggtccacatgcacacctccaacacttcccaagcgatggccagcgctaaagcagaagcaataggatgacatctgctggtgcgtctgtatccaggccgggcatacgtgtgctctggaggtgcccctgagggaggggcctcagagcagcagggggaagagtctggctcctggaacacatagtgttccctgcttgggggagactttcctgccctccttcttcctcctacgtccttgctctgtgggccattccttctcttctagccttactggaaacaacattcttccaactgaagatgtaactgaggcctgaattatggtaaaggaagattattacaacagcctttaaaatacttgcctaagctgagctcctgaagaaacttggacctgtctccttgaccacgcctttagtacgtctgccggcccgagagtcctcttttacagtaatgttgaccatattcctaactaaagcaagacctgaccagctgccaaatagtcctccccctccccccagtggaagaaatggctactgctattcaacactgagaatgccagaacagctctgtggggctccactgaaaacctgcagcagggaggctgatgatgggagctgcttagagagcttccgaatctacttcaggtaaatatggacctgtatgtatctcctgcagcacccgcacctgacatccatggctctgaggcccagaaagagctgaggaggtcatagagatcatcaatgctctgcttgctttgatgtaccattaagaagacgatctttcctctaacagccccatacaactgagcagcgccaccacgtcataccggtacccttttctttaccccttaaagaatacccaggaaagaaagataactaaaggaagtaaaggaccagatcttttaccaccttcctgcgtgggtgatccatcctcttcctctataacatcatttccctaggacagaaggaaggccctgtgagtctatgaagcggcaaaatgagtaaactgattggctgaagacagaactaatcatcctactggtatctaactccagggcctacgttaatagcatatatttccatctgtgtttaatatgcctcagaggctgagtagaggcagatcttgcttggagaggcaccatctgcctacagggattagatccgagccacattacccatatatgctcagaatggtctgtcaggaacacccttgttaatagtttagctgatactgtttctctaaggtggaagtaaaaattactaaatgaaagagcaaattgtgagatcataagactttcagaaatcccttaagatcccaaaccccatccagatcctccattgacaggagttggctcaagaagagttctagggctctcactgtgagctggcgttccacagcacaccatggtcagggcacgtctcacactgaactgtggtcctgtctgcctgctagactgggctcctagatgggtgcagtgggctgggggtaggcagaaacctcaccacacaggtctgtataggtctatatgtgccctagcaccagtagagcacctgtgacacagtcctccatgtaaatactagtggaatgaaggacaatatattctcaaggccaggggctggccagaaaagttccctcttgaactcactccacaccagtgaccctgggaaccagtggccccactcactggacagtccacaggcccgggagcagctgctctcatctctacccacattccacttctcactgatctaggcatgtcccctaggaaggcttcgtcagcgcagcctcctggccctggtccttactggcatccccagccaaggccagcactcctctggttgtgggaagggggcaccactccgtgctgttggggttacctctgcatcctgctctccagctgggaggccagcaaagttgctgtctggagactccgctggcagcccctgcagaagagcacagtttttacaggctcttccataaaggtctcgtgacagcaaacccaaaccttcttcagaacaaaattggtgtcaaataggagggtcagacctaagggaatgccttgttttctgcagcactcctggcattttgggggctttgcagccatgcatggcagacctttggttatgctactttggacatgtgcacaaagaacagagaagccagggcggttcccgtcccttcccttacctctccttcttctgagggggccctgctggcaggctggggggaagagagagcctctccctcctcttcagtgccaggggcgatgtaggagccagacatggaggagacggtgtcagtgctgatctgggaggatgccatggacatgacagactgggccaagctgctgctggcagggcctttggagacaggggatggggaaaggagcctggaggtcaggcagggcttctgcaagctttctggggagcagagccctctccctgcattcaggcattgaggagtgaagtggccgtatcttgccctcccctaaaagtggttttaggtttatggttttccaaaattctgctcctttatattttagagctcagaactcagccttggggacaagacatttgcttttccctgtcataatgctaaaggaaacctcattacaggaggactggggctgagagaattaacaccccactagctacaggcaagcctgctatcccatggtaggaaagcaagtcctcttccctctcaagccagggcctacttgtcatgcagtacaggtattagcttgccactcccatgtcccttcccggaagaagcaccaggacactgtgggctgggtaagggggaaggacatgcagccactccccgctccttatgtaccttctggggaggaaatagtggatgacagaggcgtccctgtgcaagacgactggtcaatagctccagatgacgacaaggtgagattctcactttctggagtcacaccacattcctgggggttgtggggggacacaacaggacatggagcaagcgccagtcacctgtgctggaggaaggggtcagggcggaggtctgggtagagatgaggaggaaaggcgacactgggagggactgagtggcatgcagaggccgcagcttctctcttccgtcctcacttcagcccaagcctggaatgactgcctcccaggggaggcgcacacttcagtcaacacctcctgcccagggcacagcatctgctgcggccatacaaagactgcagctcgggtgacacaggtcaccctgcagctgtgacatggggacaccccaggtttccccaggattatgatcagctttccttctgcggcaaaagcatacaaagccagcagaggacttcctgcctgcagggtatctccacgtggaccccagttaattcctgcccagctgctttctgatacaaacaccaccttgctccccagcctgctgctcctcccacacccccacctccgatcccagccccgacctgtcaggcatctgggtgcacagcctcacccgtccaagatggatgcaaagttctacgaactgtatctccataatcccttcccttccctccaggcgctcctcttttgtcttagttcacgcagtccttcttttttttttcactttttttttttgagatggagtctcgctctgttgcccagcccaggctggagtgcagtggtgcggtcttggctcactgcaacccctgcctcctgggttcaagcgattctcctgcctc[175 bp omitted]cccggccagtcacacagtccttcttgcctgggctactgaaaccctctcctggctgggtctgtctcccgtctagtccaggctgcacactgcggtcgggtgggcctttggggtgtgaagcactcactgtgcccctggcttgctccgagccccgacttcctgctctgtgcctttgcatgcatcgtcttctccacatggatgtttctctcacctctttctccatgtctaaaaaacttccaggtttagctaaaatgctattcctccataacacattttctgatttcctccacttacaatgatcttttccatctctgacacagcaatttatcgtctctgttttgggcatacttcttttttataaaatttacttagtcattgaacaaatacttactgagcaacaacaacgtgccaggcacatgctattcccatgtatatgtcctgtcccagccagacctgagcacctaagggcagggaccactttatttaccttcctgtgccctgctgtatctagctcagtgccctacagagagaagctgcataaacctttgttaagtgaggtctctgtgggacgcacagagtagaaaattccagccttctcttccattcttccacatgggcctcccgacaccccccacttacccccaggactttctccttgctgttcccagacctagggccctctctcctcgtatatctgcatagctagctctaccacttcccttggtcttggctcctggaccgctttttaagaatggcagcccccacttccagccgtgacactcccttcccacatgtcacacatgctgatccacagcaccatcaggcacacatgtatttttttacctattgtcttttgtgccccccaccccagatagcaagaatataaatgctacaagggcagggacttttgtagtgtcccagctactatcctcagcatatagcacagtgcctggcaaataatacaggctgcatacactgttgaatgcatgaatccagtgaaacctttgccactgcctcagagggtgctgacaaggtgtttgatgagtgaatgagagcagagggacctgatgaggcatgcaggtaggagggaagtccctggagtacaacacccaagaagaggagaggaatgtcaattacctctccgagatgctgaaccgacggtctctgagagagctgtgtctccgactcgctgcaggaatgctcatcttcctcttcatgcagcacggaagagttttgggaagtggatctgtaggagtccagtggaaaagcagctatatccaacgtccatttaaagaacagaacttactgcaaggggagctgaggggaaaacccaaatattttttgcttgtttattttttgagacagcatctcattatgtttcccaggctgggctgggactcctgggcttcagcgatcctcttgttgacgctttaacagaggaggagtacagcctcctgagtagccgagtaggtctgggctaacttgcctggctcgaaacccaaatcttaagtaggactagggaaatagaaccagagagggatggagacctcttttgggtgtcagaagcgctaagttttacttttagctcctctgatgacttgctatctaaacttgggaaaaaccactgccatttacagggtctcaatattttcatctgtaaaataccctcccctttactctgccacagaaaccttgtcatgatttgtgcctagctggatttagatgtttaagagatacggatcacaaggttccttcagtcttcggactaagcaatgctcccaggggcctagaaggccctatccacagtgttcaacatcctcttccctatatcccatcccctatccttgaaagaaaaaaagaatacataagagatttgtctcatcagagttttcttaagtacctacataccatcttattttcatctcttaatggatgggataaccttcacgcaagcagctctgggaacagcccagagggttactctgccctaagtccccaggatgtgggccagcaccaaggagggatgaagcatttcatcaaggattccgggggcaacagtgtggagcactggctactcacttggagagactctttttgagtttgagtccctgactgctgctgtcagacaggcggtcaagaggcgagatcgtcctgacggggggcaggtggccatcactgccatatgaagggagcattcctgagaggtggccatctccaagcacgtgaagtggaggaactgctggggacggggtgaggggcccgttgagggcctccagaagagatactacttcatagcctggtggaatattctctgaggactaggggaatcagagacaggttgaaaaattaattaggtcctttttgttttatgacgtgatcatgctacttctctacactgaaaaaaatgttttatatctgttcttgggggggtctggtaagaacaactgtactagaggcagagataaaatatcaaagaatcacacactgtagatcctgcttattggtaagctttttcttaataatctctattttttttctgattataatggaaatttggaaaatacataaaagtaaaagtaaggaaaaaaaatcaccagtaatcaaatcacccaaagttacttttgttagcattctggtgtctcttcttcccattttttttctgtgtactatttacacagttttgatcaatctgtaaataacaattttatattctgcttattttattatactttcctctttaaaaaaatagagatgggatctcactatgttgcccaggctggtcttgagctcctggtctcaattgatcctcccaccatggcctcccaaagtgctaggattacagatgtaagccaccatgcctggccagaacataaatattttcctttgtttctgaagcctctttatatatgtccccttctcatagatcccctaagttttctaactattctcctagtgctgggaatctagttgtgtctaacacatcctattgtaaacaagttttgatgaacatccttgaatgcctttttttcaaattatgttcttgttattaaattattagctcttagatgatgaggtataaatgtttttaaggccttgatatatactgctgttttctgctgttttttttttcagtgccttttctagttacactcctataagtaatacagaagacctattctgactgcttccccgaaagcagggagaatcgctaaaaagaaaagtttttaaaatttgaaagttggaaaatggtattctcatatttgcatatcattgatttttaatgtggttgaactttttaaaaaattctatgttgagtgtgttttgtttatgccctttgcccttttatctactgttttattcaatatgaactatggcaaagacattagcttttcctctgatacacacattgtaaatagtttttaaaaaaacactatttgttgtctaacttttaattttggttaccttttagacctctgaagtgctaaactttttaggtggtaaaatgtatggttcttgctttcaagcttagagaatcctttccaatccaaagtcaactaaataatcatctataatttattctagattttgaatgttttgcttggtttgctgtaatgtttgtttggtttgatgctcttaatatagttaactagttactccagctggaatttatttggtaaggagtaaagtgctaaactaatttttcctcctgaaatagctaactaattatcccaataccattcactaaataataatctctcccagcagtgcgttagtctaaagaaagacagtatctgctgctctctaactgcaaagctttgaggtttcaccctaatatcagcacttacactaggaaactgaagtcagttactttatctcaggcactgaggccacaaaacaggataaagaaaaacagttactttcttcgaggattcaaataaagataataaattgtatttaaatccaaaataatcgtcccattgtttctgcctgggggagttcaagttgaacctcactggagtgaaactgcaagcagatggctctaggaatggtaaacattaactggacaccaagttcccaaggaggaaaagggaggttttcagtattcaattttccacagtaataagttggttttaacgcatgctctcagccggcttgctaaatactgcagcatgccctggtctaattccttgctgcaatgccacgtagagaagcatgaaaagtttaaaaaagccaatgaggcatttgcttcagaggggccgtggttccgagcccaacttactggatgctcttcagagtcagatgtctgggatgagatgatggggttaaagctggttggggacaaggggcccaattttttcctcatggctcggatctgaagcagtgcccggaaggctgtgaaggagaaaacaggcaatcaggacatcctgatacaggattaagaatgaacaagagcccagacagaaaccatgatccctcccagcgcgcatccgtttgtcagatccagcagcagcacatgcttcagtgttttgtaaatgtcctcttgtcccctctcccacccaccagtccccctgccgctctggggcttacgcagtcggcagatggggcagttgttggcctggtagcgcagcgtgtctgcacaggtgttacagaggcagaggtggcgacagggcagaatcaaggtgtcccggacatccgagagacacaccacacactcggcactgttatcactcacttcgtcttcagccacctggccaaggagaaagaaatgtagccaatggcacaaagcccttcctgtcccatactttactgacaaggcagcgtggctgaagagctaagataagtaataattacgaacaaaatctgcattgacattggactttgtcattttcccagtgcgtccacacacttagcttcacttcttctgggaagtgtttatctaaaattgagaggacgagactaaccactcgagctcctcctataaggcccagagctgggcctctcaaatctcagctgaagggacttaggggatcacacagataaaggaaaaggagcaaagaaagggccctggtggaaaccgagttggacagagctctgtggcagaacaaagccaaaccagcctacttttctcatttccaaagtggtaaaagcgtaatgatctgaaatgaggaacaagaaaatacccttctaagacctaactgatttcagagtttggcacgctaaatttctggacgctggcttacgatttctcacttggcctcctggaaagagtacattcagaattttgggtaaaacttaccttagaatcttgtgtgttgtacttgttttcaattccatagatctcctgaaggaggtagctgaccccgtctacctgaacagcaaacagaaaggttcaaggacaggctgtctctactgagagacaagagtgggaactccctccaatcttacctcttttggtaaccaaggactaccgattcataatgagaaaaaaaatcaaaggcctggataagtaaaagatgcttttatttacttatgttttctctttgagagaagaaagaaaatcaaatatttaattcacccatcattatatacaacagggaacataaaatttcacaaatacaataataatacttgcactgcagcatactattatggacaattaagaaggcacagactagaaaaaggatggaagggcatgcattaaaatctaggcatttgctatataatccaatttgagttcagacattatacaaataaaggaatggaaaagagaaagaaaaagaagaagaagttggcaaggaaaaagatgggaagggaaaatatggatgcaaagggcgatagcaagaccttgagggagaggctaatggtgtgtaccccacaccatgaagccaccccatccccaacatgcagcaaaattacacctcttggccctgtttccttttttttttttttttttttgagatagggtcttgctctgtcatccaggctggagtgcagtggcaccatcttggctcgctgcaacctccacctcctgggttcaagcgattctcctgtctcagcctcctgagtagctgcgattacagggtgtgcaccaccatgcctggctaatttttgtattttgtggtagagacggggtttcaccatgttgaccaggctggtctcaaactcctgacctcaagtgatccacctgcctcaggctcccgaactgctaggataacagagatgagccatcaagcccggccagccctgtttcttaaaaccccaactaccaaggcccaatcccactcccattaacctgggccatgtcagtgtctaagttggccctgccccatttacttttaggagcacactcttctgcctcacctctgtttcttagccatcccttcccctaagacatagcctgtcgctgattttatatcccactctccgttttaacagtctgttgctaatgccaatctaacaagaggaaaatggacaaaccatcttcctctagctacacgagcctttccatcccatccaggcctcctggagaaccaggccttcccccatgaggcaactcaccaaggcctggcctgcccaggtagtgccctgggcctgagcccaggatctgtttcctcctctgctgctcttaaaacttgttttcatgcagtgattatattggaaaactaatttatcctaagatattcttattattgacctcattaaaagagaggcgagtaattaacctaaaagaacgaacagtgtagaatttcaggtatctatcacccatctacaggaaggcttttctttgcatctcgaggaagcccaaccctgcctcctacccagctgctctacaccctccgtgagatgacctgcccctcacccaccctcccttgccaatgccactggcaccactctctctcctcccagtgatgtctcctcctacctctacaagagtggaaagaaaagtgctggcacatggtaggggctgggactttctagcagacatatgcacaaggtgctgatcattctggaagagggagaatggatggctaactttgaattttagaaaaggaatggataaattaagccaatgactctaattacactaaattggaccctaatgctttatcctttcgcttgaaatgtttctcactctggcattttaaataaaaagagttctccctaaacccaatgttgggaaataaatcttgttctttcatttctcaagtcctttgctcagataaaggctccctcaacaccaacacttctggaacaatgaagacctcaaaaatcagcattcctttcaggccacccaagtcgtttgtaatagcttgtaacattcaaaagcactccctttttttcttttcttctttgattaaaaaaaaaaaaagaggaaaaggagagagcaaaaagtaaaacaaaaataaaaaaagagggagagagaagaagaaaggaaagaataaaaggaaggaaggaccctaatactaacagtctgtggtcttcaaatacttactacttgtttctgtttgaggggcttgacacagaaagttccatctgtgtgctggaatgaaaatatgaaagttatgacaaggaagggagggtaataaagcaccaggtattcttctgttacatctcccagttacagtcgccctccctgatctgcagtttcattttccatggtttcaattacccgccatcaaccactgtctgaaaatattacatacaatattttgagagagaaagatcacattcagacttctattaccttatagttataattgttttagtttactattattcttagtctcttactgtgcctaacttatgaattaaactttatcataggtgtggatgtagtatgggaaaaaccacagtgtatatgagggttctgtacgatctgcagtttcaggcatccactgggggtcttggaacttatctcctgaggataaggggggactactgtacacatgttcctggacactctcagagcagaattatacaatcctaattctttaaaggtcttataattatccagtctagcctttctttcttttatttatttattttttttgagacagagcctcactctatcgcccaggctggagtgcggtggtgccatctcagctcactgcaacctctttcaccattatagcctctaaagccagacccattctgctgagctcaggcacccagcaaacgggttacatgtgtctcacacgaaagaaagggctaaaggcaataaagcgaggccctctaaagtcactcaccttctcaaaagtacccagcagtacatggcaatggccaaaatactctgaaagaaacaaaggcacgtgagtgaagaagcccaaacagcacatcttgatgcccatgactttctccagttccctgcaatctggcaaaccaaatgtgccagtctgtctctagaaggggcacgttatataacccatacttttttttttttgagacagagtctggctctgttgcctgggctggagtgcggtggcatgatcttggctcactgtggcctccgcctcccggttccagcaattctcctgcctcagcctcccaagtatctgggattatacgcatgagccaccatgcccggttacttttctgtatttttagtagagacggggtttcactatgttggtcaggctggtctcaaactcttgacttcaggtgatctgcccgcctcagcctcccaaagtgctaggattacagggatgagccactacgcccagctaaaccacatttttttgagactgagcctcactctgtcacccaggctggagtgcagtggcacaatctcggctcactgcaacctccgcctcccaggttcaaacgattctgctgcctcagcctcccaagtagttgagattagaggtgcacactgccatacccagctgatttttgtatttttagtagagacagggtttccccatgttgcctaggctggtctcgaactcctgacctcaggtgatccacccacctcggcctcccaaactgctgggattatacgtgtgagccactgtgcccagccaaacccacacttttcacatcagcccaggagcttggagtcacagatgtgagaggatgcagagactgcctgactcacagtcacaaacacccacaaagaaggcatgttgttctggggccacagctgctgccaggaatatgccacaaaagagcagtgtgcacagccaaagaggacagaaatcgcccctaccgtctccttcatccaccacggcatgtaccactagagggtaaacttctcggtctaaatcaaagccaagctgaagggaaagaaaaggaaaggaaaaaaaaagaggacttaacacatttacatggcacagctaatctcagaaagggcgatactgtcaagaagcattaatctcatctctgctcctcattctttagccttgttaattacccaagtttgttaactgagggccatcagctgctttttaaaaatgtcatagatgtaaataagaacctctaacctatagattttttttttctttgagcatggctttctcaaagtatcctaggctaatgggctatttccattcctagggaatggaaaaattaacaaagttaggtatatccttgatgcaaaataagcagagctttaaaaggacatgatgaagtcacaaggctgaaaggtaagcatggccttcaagcatccgagcagcccctttgctgtcagaccgagtcctaagtagcccctaggcccttctgagtggatgtgggaaaccctccccagaggcagctcacctcctcttcggcccactcggagggatccacggtgtgggagggcaggcagaactgctgacacactcctcgcttgtactgcacagtctccgactggaggctgttgtctttgggaatgtagctattgatacaagtgggaggcaaagcaaaagtcagtatccggcacagatgggtctgacaacttcctctgctcatgcctgttctcaattatcaacagggtctagcgaagagaagaaagggtcctttataatccatttcctttgctcttgcttggcaacgttaaacttttctattcaacccacacatccaaagaaaggtagcttactagatttttaacagcatgttaaggacctgaaggactataccaccatttgtcactataccaagatggcacaatttgaagggaaaaggtaaagggtagggctttgtagaagaaagtctaaattcaggaaccagatctcatctggctgcagaaaaagaatgttttccgcccttgctgagtggataagacatggactctccctatctgggaaggaagtggctcgcctggtctcctgatcttacctggtaataccattctggaactcttccgtggcctggtaataatctgggaaggaagtggctctcctggtctcctgatcttacctggcaataccattctggaactcttccgtggcctggtaatagatggtgatggctacccgagcatctgtgtcaaaggtgaactcaacattgtagtggactttagctttactggcctcttctccagggctcttcacttcctcagcacatctagaaaaccagagactcagcatttgcagagtagcatatcaatattttaaaatttacctttaaaaaaattagcaatatattgtgggcttctctgaatgatcataagcataggtctacctcttcattctgaatgatcacagagtgcttcatgacccatgttgctgggcattcaggttacttctggtatctcatagtgctaccactacaccattgtgcatttggcacttttgtttttattttaataaaagttattaatcacatagtttaaatagtttcctcaaggcaaaaaacagcaggccttacttcttccctttcctcgtcttcagaggacaccccttttagtgatcattttggcatttacccacgtttctaaaaaatatacttgggttactacttcttgatttttcagtttcaggcgctatctatgggtttcctactatggaaacaaggatttctttctctttcctcactgtgctccatgtaggaactccgccatccccccagtgtagctgcatcatgattttattataatagtccagtacatttgtgtctgtattactgtgattacacaaacttataatctatgattatttttcttttcctgcataactttttcttagtgctcatcctatttttttttttttcttccagttgcgtagtttcctatgtactcatcacaaattccaacccaagctctctggggctgtctaaatctctcaagacgttcagatgcaccaagcggtctattcatttcatcttattgaggaggtcccttggacttgctcccatctgtacttggccctctgcacctggctcccagtcgccaccctggaatctctctccccctccaacatcctggtgggtcccttttgcctctgtcctcctgtagaagctcatgtttcctgcacctcaagtcttcctctgtcttgggttattctttcatatcggtggagcacgtgtcctgccagcttcctgaaaaagggtgtgttgggaaataaacttttgagagctattattcaacattcacacttcactgaaagtttggctgagcaaagtattctagattataaataatttctaaaagacactgaaagccttttcactgccttatttttcacctcccagcgttgctcccaagaagtctgaagtcgttccaactgttgatccttcttcttctgaaagcttacagacggtcctctttctcagccactgtgtgggcacttggtggtcctttccatttagaaacttgtaccctctggttctgagaagttttcttaaattctatgtcactgatgatttccttccttttacattctctgttctctgtagaacccgttagttggatgtcagaccttctaaatgggtgctctattacttgcgtctttcttcttctattttccttctctctggatttttgctctactttctagaatatttcaagttttcttcctatcattctattgaaattttcatttctgctccctgtttttaatttctaaaagctatttttttggtttcataaacactttgtgtcattgtgtccatgaaagaaaaagataacttctctcatgtctttgagactattaatgaagttttcttcttcctgcatagcttttgtttccaattagattttttttactttattattattttatatagagatggggtctcactatgttgcccaggctggtctcaaactcctgggcttaagtgatcctcctgttttggcctcccaaaggtctgggattagaggtgtgagccaccacacccggcctagttaggttttttttttttttttttgagatgaagtcttgatctgtcacccaggctggagtgcaatggcacgatcttggctcattgcaacctctgcctcctggattcaagtgattctcccgtctcagcctcccaagtagctgggattataggcgtgtgccaccaggcccagctaatttttttgtatttttgtagagatggggtttctccatgttggccaggctggtctcgaactcctgacctcaagtgatccacccgcctcaccttcccaaagtgctgggattataggcgtgagccaccgcacctggcctagttaggttgttttaaaatgttggtttgttttgctactgtctttcctattataggcattccttacacatctaagaatctgtggctgtctgcttgtatttaagatatttaaactgctgattagagctctgagtgcacagcaggacttggggatcctgggcttcactgtgggctgacctggatctgttgaggaacctctaactctagtctcttaggttttcctatccaggcaggtccaatttccagaaaacagttttcctctctcttgacaaaggcctggctgccagcattctaggggcagaatggagaggcagctggagggctcaacatccagtatgccaggatccactcacctgctgttttgttttgagacagggtctcactcttgcccaggctggagtgcagtgctgtgatcgtgactcattgcagccttgacctccctaggcccaggtgatcctcccacttcagcctcccaagtagctgggactacaggtgtgcactaccatgcttggctaatttttgtatttcttgtagagacagggctttaccatattgcccaggctggttagcctgtttttagtactggccattagctgtgcctgggtctctcttgtccagagattctctgttttgacctttccagggagagtcatctgcctgcctttggccaaggtgtaggaatgtagttctggctgtgtggtacaagggagaggatctgcctaccttgaaggcagactttctaccaatcctcttcattttagcctcccacctcaacttctagagggacctggcactgctaatttctgaaccctttgggggataatatcacagtataaattgggtgattctcagcttttctttctgctagttcaggattctgatttcctgggtctactaagtcatttaacgttcactatgtgtttccagcttctaaaatgttgttgctgttgctctcttcccattctccaaatatttacagatttatgcctttttaaagaaatttttaaaattttttatttatttattttattgagatggagtctcactctgtcgcccaggctgaagtgcagtggcacaatctcgcctcactgcaacctctgtctcccgggttcacatcattctcctgcctcagcctcccaaatagctgggattacaggtgcctgccac[138 bp omitted]ccgggccttattttttattttttagttggagtctcactctgtcacccagagtggagtgcagtggtacaatctcggctcactgcaacctctgtctcctgggttcaagcaattctcctgcttcagcctccggagcagctaggattacagatgcgtgccaccatgtctggctaatttttgtatttttagtagagacgggtttttaccatgttggccaggctggtcttgaactcctgacctcggtgatccgcccgccttggtctcccaaagtgctgggattacatgcatgagccatcatgcccggccagatttatgccttttaaatacatgtttataattacttaatggggttttcagaggaagcaaaagtaggtgttcaatcctccatctttacctggaaatccgagaatcagaatttattcccataatcacagaaaaacaaaacaaagaacacccttcaagttaacatttattgaacaccaggtgttttcccttctgttaccttaattttgacaaccaccatgaaaggtaaagttgattatcaccattttacagataaaagaacctgaagctcagacactcattcaagcaagcatctgtggacctgggaggcaaactgctctgctgcttccaagtctggttcttctagcgcatgacagctgcttcatcctattctagagctgcagccaggctgccacggcagaggctatgacctcacagcagctcaggcccttgaatggtctccatcaaatgtgtgaatgtgccatatgtgatgagagaaaccaagtggacagagtagctggcaatggcaggccccagaggcctcgttagtctgctctgctgctggatgaactcccctgggtcaggtcgggggactgttctgcagcagacaggtacctccttgaatctctcctccccagagttgaccctggggtggagagaagcatagctggggaaccagcagaaacttcagggacaaataaaatataaaaaattaagagagagaaacagaaaatagattagtggttacttagggctgggaggactgcttgagcccgggaagttaaggctgcagtga[147 bp omitted]catggagaaactctgtctctactaaaaacacaaaattaaccgggcgtggtgatgcatgcctgtaatcacagctacttaggaggataaggcagaagaatcccttgaacctgggaggtggaggttgcagtgagccgagatcgcagtgagccgagatcgtgccattgcactccagcctgggcaacaagagcaaaactccatctcaaaaaaaaaaaaaaaaaaaaaaaaaaggcgagactctgtctcaaatatatatatatatatatcagacagaaacattgtaatgctaataaggctgttctatacaagcatgagatggtctctgagtcatcttccttgcctattcagaaaaatctgggaccttgatttgccctaaccaaattttttcaccagagaatcagacagccttggtagacatatcatctaggggtggcgggcagtgggaatgtatcagactaaaaattacactgtctcaaggatggcaccaagaaggcaaatgacgataattaacattgatgatgaggattaagcaaccaacccagtgcactatgagttcctt[187 bp omitted]gtggcgggcgcctgtagtcccagctactcgggaggctgaggcaggagaatggcgtgaaccctggagatggagcgtgcagtgagccgagattgcgccactgcactccagcctgggtgacagagcgagactccgtctcaaaaaaaaaaagaaaagaaaaagaaaatatagcaataaaataaaggatttgatattctaagttcaaatttcccatttttacattggcttgttggagtagctgcaaaaattcccattttcccttaataattcttcttcccttttaaaaaatatccataaaataaggatactaagcatttctaggcaagcgaaagtttttcacaaacacagacgattgcatccagtgctgaacaacatgggtgtggacggcctgatctcagcagaaagtagcgcccgcactcctgtctgaggcccagagaagcaagctctggggctgccggaaactgctgtatgagttccttgggaagtctgtcccccagcccccagcctccccaaaggaaggtgcctgggacctggccccagcctctgggaacttacttgacgagcctcagtgtgtcctttcggatattgaccaggcttctcagagtcttcacgggttcttggggaggtggggcggcgtaaggaaactgtgtcagaaacaaagcaggagaaggtggtgtgtttaaaaagacccacagctgtccctcgctttacagtttgccaagaatagccctaagaggtgaggcaggaaggcacaactctcctaattaagtgaggaaactgaaactccgacatactgagtcaacctgctcaaggtcacagctagcgggaaaactgggatgcaatttggggcccaaagagccagatttatcttctttttccattatatgaagcttatttcggtcagtgttcaaaacctggagaattaataataaaaaaaaaaaccgctgaagttccaaataccaaaggacacactgtggccgagttaatcacaaaaggcttttccatctgacctcagacgacagggaaccagacctgcaagccctttccttcggtgaggccatgcggtatcccaggagtttagggaccgcaaataaaagagggccccatcatgtgtacagagctgaagtttgcaaacagtaaagaacaaacttcccctgcagctgatcatataaagcagagctctttaacatgtgagccaagagttattttggggtcaccaaaggtttatggttgtcttcatcatttaccatccgcttcttccccctttgcccgtttagacctttggatttgaagttctgagttgttgataatgatgagataaagaaaggggaaatagccaaaaatttcactgggaattgccttctgaggatcaagaatgatttcaaatgttcccggtatttttaaaatgttatttgggcaatcaaaatgttttaacatataattcccaaaaaacctactggtctctgcagctttgcaaaactgtggttctcttggctcaagaagagtctacctccatagtgtggtatcacaaaacaggacacccaagttataatcaaattgtgccctcacaggtttttattgaatatggttattttacttgggaaacaatatagttaaaccatagttaaggtgcatctgacttaatgtacgcagtataattgcttataattcacaggtatgaatgtgactcttacattcaatagaaattatcttcattcagattactcactttgtgggcatgatgcagtaatttactttttcattgatatattaaccatacattcttttaaaaatgatagttttttctaattacaaagtaatatatgtttaagcagaaaacttgaaaaacacaaaaaagtacaaaactatccctaattttactactcggcaataccaaaattaacattatggaatacgtatctccatccgtccgtctatccatccatcctgtccacctctatatctatgtgctgtttcacactgaacatactattttgcagtttctttttcacctaaaaagatgtggtaaacatttttaaagtccataattttgataacattgcagataatagcatactttaatcaattccatattattcaatattttatgttggttttactttttttcgcagctataaatgttgtggtgaatatccttgtccctatatttctgcatgcttgtttgattatttcctaaggacaaattcctagaagtggaattacaggatcaaagagtaagcatatttttaagactttaaaaattattttgccaaacagttttccacaaagctgactccaactttgccctcctgcaagcagtgcatcaggaggccttgacatggtaaaactgaaattctagttcagatcccatctgtggcctgtttctcctcccccaactttcctaggctgtcatactaaaggaatttaaaacaatttttaaataagcttaagcaaaaagtaattaggcaggaaaatccgacacaaacgctagtctattctaaagccaaaataaatgactttgggattaaaatttttttctggagtagcaaagttaatcattttcatttgtacaggtacttgggcgttatccataactcctacctgcatttcaaaaaaaagatgcgtcttttcccttattctttactctttctcctccatagccactccctgccgcaaaagagagaaaaataaaaagaaagaaaaaaaaatcctggcactctttatcctccattttgaatatatttgatgataactgtggcaatgaaacataagctatttggctcttaaggaaaggtatcaatgagttcaattgtttataaatccacccctatactttaggctctccctgtacacacacatacacgcacaagacaacaacggcaaatctgttcaggagaagcttgttcgtgggctgctacccaccaaagtttgtgccttgctggccttgcattcatgcaatcagagtctacatgcaacactccatgccaggagtaaggagagattgaaaaccaagaagataaggccctgctctttcaggaagctgcattataaggcagctgacatagtaattgtaatatcaaagagattaaatatatggatatttttttgccacaaaaggcaaaaataaaggaagtgatcatttctggctgaggtaatctgaaggcttcatggaggagttggtagttgatctgggatcctaaaggataaatgaaatttgcaaattcagagataacagagaagatggaggggacagtaggatcagaggcaaattaaaaaaaattttttttctgctcttagagttgtctcccattcttctgtaaatcgattttgcctactattactctcgaaatttcttagtgagttatcttcctttcaaaaattaccatttattgagtgcttactattgatgacagtggtgggctgtccagagcagccgctgccatcacaacggctgctgcaggggggtcgcagggagcagacagacagcccctccacagcttgccgccctggaggccaccccatggggctggccgggttacccaccagcagaggagcagcgtggcagaagagcagcgcggtagggcaaagaggagccccgaggcggagctgggccttggccagtgtcccgcttgctcatggagcgccagggccaggcctgggcgcggagctggggccatgcttcaggggccccgggcaggaagtgggagcagcttccgcttcgggcacctggccattggcgcagccactgtgcccaccctgccgagggtgccaggttcctgtgcctcgggaggaggttctgcgcagcccgtctggggctgcgcccccaggtctgccccacattggggtgaccactgagcctgacactcctgggcagatggcctggcccaggcccaggcccaggatccactctgtcccagactgcccgtgaagcaccgggggaacaggcagagctcatggcgatgtcaccctgccctggacactggccccggccctggccccggcccagtgaggacctggagcccctgccccaggctgcaagggggtgctgcaggggctgcatgctccacagagccggtggaagccaggaacaggcagcagccccgccttgggctgtggatcgggggcctccataagctcttggagacacggaaaagccctcccacccccccgccccagcaggctcggaagtgcctgctcctgccgcctagcttctgcttgctcttggtgctggctctgatcttagagcagtgtggggccaagccaaggtgctgttgcagccaggctaggagtgcacatgctcggggtagcgctgacaagccagccccctgctgcctcggccccttccagactttgggcactgatgagcatgagggaaggggaagggggagaggcgagggggtgctgagggcagcttggtgctggccttcagggaggacgtgaaggctgggggcctggctgccagtcccgcccactggagtgggaacttgtgttgccttttctaggcctgcccatggatgcccagggaccagtctacctgcacttcctcccctctgaggcccataaaaggcccaggctcagccagaacagagcagaggttgggaccaccagctgcagagaggagcaacctactccagtgcctcctctctgctgatagctgcagagatgtccataagaccagctgcagagaggagctacgcactccagggcctcctctctgctgagagctgcagagaagacaggatgaccttcctgcggaaaagagcttcccactccagggtctctatgctaggacacttgtcaggacaccctggctgcggaaagagctacccactgcgggtatcctctgagctgttccaaggctcaataaggctcctcttcgtcttgctcaccctatgtttgtctgtgtatctcattcttccttgttgcaggacaagaattttggacccatggaatggtgggactaaaagagctgtaacacaaacaggactgaaacatgctccttgcttgtcatgttgcaggcaaagaggagagaagagctgtggcccgtcggggagcccagacctgggagctgcccaagccagggctatgacttcctctttgtggccctgtagttcctggcatctccaagcttccgggtgccaccacattccctggtgccaaccgggagagctgcttgcagtgcacctggtccagccacagcctcgcagacagctggcacctatactggcacctggggctgccagccccacagcggcagctggcgtgtctgactgcacagtggccggaccccactctcgctcacacaccccttgctgctccatgcctgacttgcagtctcccttggaggcgtgggatataggctggtagtgtgagctgagtgcagcctgtcaggccaagtgggtggaagaagcccaatgtgcctgagccgaacctgtgcaaggcaccactggccacaggtttccagccagaaaagtgacaccccaaagatcacataatactatgtgccaggcactatgctgagctctttatttatattatcttatttaatctttggaggaatcctgtgaaatagtcatggttgttcccatttttgcaggtaagaaaacagaggttgcaaagaggttgaaaaacttctctaaagtcccccaagttttagggagcagaggttatttttctctcttttttttttccagtaactaacatgtcttaaagggagcagagttgaggtttgaacacgttctacctttatctttccccaagacgctctggatgcagctttttaatctagagatgagatttccaaggattaaagtgctggttattaaaagatctgaagacacaaatttatttattttctcattcctttctaaagtcaagacatcagataaatgtttgtgtttgtccacactatctcctcaatacatgcaccattactaagttatatttaagacaaaaggtgtatcctggccgggcacagtagctcacgcttgtaattccagcattttgggaggctgaggcagaaagatcgcttgagcttaggagttttgagaccagcctgggcaacatggcgagactttgtccccacaaaaaatgtagaacttagtcagcatggtggcacacacctgtagtcccagctactcagaaggctgacgcaagaggatcacttgagcccaggagattgaggctgcagtgagctatgatagcatcactgcactccagcttgggggagagagtgagaccatcccaaaaaggaaaaaaaaagaggccaagcgtggtggttcatgtctctaatcccagcactttgggaggtcgaggtgggcagatcacttgaggtcaggagctttgagaccggcctggccaacatagcgaaaccccatctgtactaaaaatacaaaaattagctgggtgtggtggcacaggcctgtagtcccagctactagggaggctgaggcagaagaattgtttgaacccaggaggtggaggttgcagtgagctgagctcatgccactgcactccagcctgggcaacaagcgagactctgtctcaaaaacaaaaaataagtatcttatttcaacctaaaaccagagatctcactcatatgctaacaggtaagtatgaaaggaaagaaaactaatgccttcttgggaccaagaaagatgaagctcagaacagattcagggccaagcatttttctgaagtactcatgcaccagtccactgtacttagcattagcaatcgttttctcagttcatatccacagagtttctgttttcttttttagagtctgcaaagggtaattttctcagccctaggtctactgagtaagggagtgcatggtgacaaggaagaccagataaagtctttctgatgtaagcatcctggcatatccggaaacaggaagagcttccttttctgtcttgcacacaacatgccccaggtccacagacagagggagactgagaagctttctgatctcttacctcaagctcagtatggatttatagaatggcttcctgtttctcaggtatcattctggagtaaataaacccttaacagccttatgaaggacaactaaatgcagcttctagaatcctatttcactttttataatgaaaacaggcctcagatcaagactcatgaacaaagaatgaaatttggtctgctcagggatttggggaccaaacattaagtgtgagtacctttacgacagaaaagcaaggcacagatccccctaatctattcatctaaccagaaaactctgccaaaagaaagcccctttcatggggtaaaacttgggtaacctgcaattacagcttggcaaatcatgaaaaaagagaatgtaaggaaatatttaactgagtatctactatgtgccaggcattatgctaggtactttagatagattctttttgtcccccattttactttacatattttttatctttatttttaaattttcgtagagatggggttttactatgttgcccaggctggtctcaaactcttgagttcaagtgatcttctcgcctcagcttcccaaagtgcggggattagaggtgtaagccaccacacctggtctttttatttttatcttggtaaaatacacataacatgaaatttactatctcaatcatattcaagtatacagttcagcggcattaagtaacattcacattcgcattatcgtgcggccatcaccgccatccagctctagtttaggtatgctcttatttcacattctcgaaaggaacaacatgcctgcccctctcaccagcctgtaagttccgtgtgtatgctggaggacagtccaacatgccggagaaatacagtagccgactgaaaaatgaagaatgtcagttaaacaaactgacattctacagataaagaaaccgagactcaaaagattcacgtaatcatccagggtcccagagctaatgagcagcagaaccacaatttgaacccaggtacatctgactccaaaagccatactctattgcactgcttctactgtagggcaagtctacaggctcttctaatcctaggagtgttccagggacctgagcagagttcggggagtctgaaagttataccatcatggcaaacagtactgaattctgtgaaggttctggaagctagccaaaaatctccaatggcgccctatgcttagatggcagtatgtacaaaatcataccacgcaccacactcctttctatctttaacaggagtatctaaggtcttcttagagaagagctttcttggagcacagtatgacaaaatctttgtctataagatctaacagtacctgcagaagatacaaatgtacactgagggcagggtgatgtcagagaacactgccagcagccacagccacaatggatacgtcagtcagcgtttaccttccacccaagatgctcaaagatgtgttactgccagatagttctaaaatatggcgacttcttcactaaattgttttcaaaaaatggtcgggtgcggtggctcacatctaatcccagcactttgggaagccgagacaggcagatcacctgaggtccagagtttgagaccaggctggccaacatggtgaaacctcatctctactaaaaatacaaaaatcagctgggtgtggtggcgtgtgcctgtactcccagttactcagaaggctgaggcaggagaatcacttgaacccaggaggcagagg[131 bp omitted]tcagcactctcactatatcctgagtactgaactaggcctgagggacacagtgaagagtcaagcaaacctctcttagttccatctgtaaaggggcgtcaagcttgcatctggtgccctgcatgcttggatacaacatcctcctgggactgggctgctgtgtctgtcctgaagtaagcctgaatctgagaataacttaaatcccaaacatctcaaacccagaatggaagtagagttgggctcagccagaagacctcttttggtggacctcaggcgtttgctgacgaaggctctgtgtgttacgtgagcaactcctctttggcttttgaccctggtgctcatcagcttccttttaccagcacatcacatcggcaaagcgccacctggtgacgaaagatgaaattgccagaccatgcccaaatgcaggccagaagggtgcacgtgcattcacatacacatgggcacacacgcatttagtctgtgtgtgtgtgtgtgtgtgtgtgtgtgtgtatcaatcacatgtcctagatttttttttttaccattctgatttcaaatattacactactcctacggttgtactatttttgctgtaaaaaaatatggtcacagtacatgtgaaaggacatcttactctgtgtgtaaattattaggcaattcccagtagtctacaaaaaaacacaataatccattcatcccatccataaaaataaagttaacttcaacataaatctttttttaaagtatatactttgttttcatttgctattagattcaggcctcgtctcatatatatatatatatatatatatatatgagagatatatatatgagagagatatatatcctatatatcctatatatgatatataggatatataggatatatatatcctatatatcataataatatgaaaactatattattaccatcaattctcaggtaaagaaagtattgatattgtatacttctgttggttacttttcgctcttgttgccctggctggagtgcaatggcacgatcttggctcactgcaacctccgcctcccgggttcaagcgattctcctgcctcagccttgcttcccgagtagctgggattacaggcgtctgccaccatgcctggctaatttttttgtatttttagtagagatagggtttctccatgttggtcaggctggtctcgaactcctgacctcaggcgatccgcccgcctcagcctcccaaagtgctgggattccaggtgtgagccaccacgcccggcctcacgtgggaatatttttgaaaactgcagatcccagggccctgtcactagaattctgattcagctagtttggggtaggaactaggaatctgtattttaataaacattccaaccaattctgatgcaggtaggttagagaccccactgaaagaaaaaatgctggtcttctgcagctaataatatttaattatataccaaaataaattcacataaagtttttttttgttttgttttttagaggtagggtcttgctatgtttccatgctggaatgcagtggctattcactgtgaccatagtgcactacagccttgaactactgggctcaagtgatcctcctgcctcagcttcccgagtagctgggactacaagcaagtcatcacagctggctaatttctatcatttcttccacattaaaaaacatttatggatatagaataattatagctttctacatttattagctgggattctactgtaaggaagagctgtcctttatcattcaattattcaattatttcttcatttgtttaattataaattatgtatttatgtaatttattttatattaatttttttacttaagtaaaaacaaaaaacccaaaataccaaaaatatgcttccaaagacaggaaaccattttagacaatttataattaaaatagcaaagtacaggctgggagcggtggctcacacctgtaatcccagcactttgggaagctgaggtgggcgggttggttgaggccaggagtttgagaccagcctggccagcatggtgaaaccccgtctctactaaaaacacaaaaaattagccaggcacagcggcacgcgcctgtaatcctagctacttgggaggctgaggcaagataatcacttgaacctgggaggcagaggtttcagtgagccaagatagtgccactgtactccagcctgggcgacagagcaagactccatctaaaaaaaaaaaaaaaaaagcaaagtacacattttgtatattgggcagacatttaatatttatgccagagaatcaaataataattactatagaaaccaacacctggggtcatatcaaaaactcattcatggtactacataatctctttttttatagggttttgtgtttaaattctatttcatttttatttgatgcctggttattttcccagctttctctgcttcccttctcctgagatacataacgtgtccaaggcttaccagtggatatttttagactggtgatggatcagtgttggggagagcagcttcgtatttgcttgaatgctgtgaagtgaatacaaatttgcctatttacccagattcatccctgagacagactgatgtgcctgctgtagatcagaacaacaatgatctatattaactgcagtaaacctcttttcactaatttttcaaccaatcctcatggggagccaatcaccagcttagaatgaatggtaatcacaaagctgacaagataaaagatattctttgtacccaaatcaaagatatgagggagatagcaagagagtgtcacagatgaccttgcacacaaaaatgctttgtcttcagatttggctatcaaagaaatcaatccaagaaagcactccatttatagtcttcgaactcctctgctaggtctcttggcaggaagtacacaagaccaacgtcatggctatatgacctcccacctaatgttgaccttttccaaaatatttaattaagcaattgcacagttaagcaattctctctgttcaccttaacaggtgataagggtacgaaaaacctaccacagagtaaagaacacatcataaaatggcatagatcttggtaatgaccatcacagatccattctatatctctccttatgttttaggtcttgactcattgtttgagaatactgagactgggcaacatgctcagtcccactctgtcattaaacacacctacatggctacgtgaactgcttagatgacaaatgaacctacttgacttccaggcccccccagataggaagcctcccttcccagcaggctaaaaccttctacccaatcatgctgtgcttctagaataaaactaccttccagaagacgaattgcttttagttgcaaaagattttgcctaacaccagctaattttaagttgagttaaaaggagaaaagcgtgctcttaataaagcagacacagtcatcttttcccctccagcgagttggtaa[144 bp omitted]gcctcccgagtagctgggactacaggcacccgctac[187 bp omitted]acttcctgatttcatttggtcaggagattcataaaccagctcacaaattagaatacacttttaagcagcaggttttgagatgccttgatactgtatgtatgtgaagaatatgcttacagaagcaagcaccagtatcagactaaataggcatttaaaaatataaaacatatatatatatatttcttcctaagcaagtatttgaacgttctaatgccaagtattaagtttcccagatattttaaaacagaggcatttttgataggccaattactaagggcaagaggaccaaaatcttccctactctctatttcaaaaataaaaaataagaaactgtaaactggtcttcaagctgaaaaactccaagctgtcctttcatgtcccattaaaaaacatcgactctaaaactatttatgggccaggtgcggtgactcatgcctgtaatcccagcactttgggaggctg[135 bp omitted]gaggcaggagaaacacttgaactgaggaggcagaggttgcagtgagccgagatcacaccactgcactccagcctgagcaacaagagtgagactctgtctcaaaacaaaaaacaaaacgaaacaaaaaaaccccaaaaaaactacttatgtaagattcaagattaattacaagagttgtcaagatttctctcatattcctggaaggaaaata[145 bp omitted]accccatctctattacaaatacaaaaattagccaggcatggtagtgcacatttgtaatcacagctacttgggaggctgaggcaggagaattgcctgaacccaggaggcagaggttgcagtgagctgagatcgcaccactgtactccagcctgggtgacagaatgagactccgactcaaaataaataaataaataaataaataaataaataaataaataaaatctcaactctggtttgagaaaaataataatagtatgaaatatatcaatggaaatagttaagtttataagccaaacaaacatggaattcaaagccctggcaaggtctggttactctggctaggctatgtatttgcagatacagccctgggaagaaagtcactattcaatcaataactctaataggattttctttttttcttcttcttttttttttcttaagatggagtctcgctctgtcacccaggctggagtgcagtggtgcgatctcggctcaccacaacctccgcctcccaggttcaagccattctcctgcctcagtctcccgagtagctgggattacaggtgcatgacaccatgcccagctaattttttgtattttgagtagagatgggggtttcatcatgttggccaggctggtcttgaactcctgaccttgtgatccacccacctcagccacccaaagtgctgggattacaggcatgagccacggcgtctggccaggattttattttctttagttaatcctgtggtatagaagccctagataattagaacaaaatagcataaaataaaaatccatagcatatacctgatagttttattttatttatttatttatttttttctgagacaggttctcactctgtcgcccaggctggagtgcagtgtggcaatctcagctcactgcaacctccacatccggggttcaagcgactctcctgcctcagcttctcgagtagctgggattacaggtgcttgccaccacatccagctaatttgttttgtaatttttagtagagatagggttttaccatgttggtcaggctgctcttgaactcctgacctcaaatgatctgcctgccttagccttccaaaatgctgagattacaagtgtgagccaccacgcccagccctgatagttctattttctgagttattaatgtaaagatgtgcggaaaccctaatggaaaaatctattctgcagctagtttaataaggtggcacttgttccgttttgcattgctaagcttctaagagtcttgagagctctgattattcttcagtcaccccccaatagcagtgggcagccaagattctgtaaaccaagtgaactactttctttggcttttatgaaagtctaaactcatttaaagaccggatatagtgaaatgcagtggctagaactttaggttctagatggtgaacacccatactctatcatgctccaactccaaggtgacttacgttctcttgtactgcatcccacggcctcctacctgggatcactccactgccccatgtggtcacccatcacttctcagcccatccttgtaaatctccactccttgagccacatccttcatcacctccaattttccttattctcagcaacctcttctctgtggttcttcctctttttactgattttctgcatttcattaagaccctgggcttctgatcatctttcagggcttgtcagaggtgattacactccctgaagaataaataggtgtcttagcattaaccacaagctttctgagactaaaaatagccaagttccaactttaaacaaggtgcaagcaaagatggtgcaatagatgcaacagataattccccccaaagcaatgcatgctagtatctcccaacagtgttagtttggcttctaagtttataattctcagtctggtcattaatacaaacattctcttatgctagttaatagtctgtaaagaaagcatggctccataattaagtgggaagtcaaaagttcagcaagaggatttagtgactggcttctaacgaatacatcatggaaaggggaagatttacagtggataaacctgtaccacccggaccatgtaaacagggctgatatcaacagcaataagtcatgtgatattatgtacctctgatatgatgcaactacatctgtggttttctttcccaaagtctataatcctggtcttttgatatttcaaaagaaaacattagaaaaacccaaatcaagggaagttctacaaaatacctagccaagtacatctaaaaattttcaaggtcatgaagaacaaggaaaaattgagaaactagcacacattggaggagatgaaggaaacatgagaaccaaaagtatcctggactagatcctagaactaagaaaggacaatagaggaaaagctggtaaaatcctaataaagtctagttttaaaaatagtaatgtaactgtgttaattttcagtctggataaatgtgttgcagttatgtaagatgttaaccttaggtggagctggataaaggctatatggcaactctgttatcttttgtgattcttctgtaagaataaattattaaaaaaattaattcagcaagagaaatgcagagatgaaatggaaggagctcaggatctatgagcagaaggcgtgggtctcagctcctgtgctgctggttacggtgactttagacaagctgctttgccctactaagcctccatttccttatcagtgaaatgagctccataacagcgacctcaaaagttgtgagagtagaagttgtattaatcatggtttagtcaggaaaacaggtactacacaaggtattttaataggcagaattaaatacaaggaactggttaaatggatatcagagaactaaaacacgaaaagggggcacggagctgacagagagaaactgcaggaaacggtttccatccccatggctgaggaaacaaaagggagaggttgggttctcagatcctggaagcccggagaagggaccctccgaagctgggactcagacttctgaggtgagggtactgcccagctggttctgggtttgttgggaggagaacacaaacaaaaacaactgaaggctgaaacaaactgcagctggtgggatgaaaaggcattgctgggatggtggtcataggaacagccaggcgcaagaagcagtgggtccttctcctccagccctgtagaccttccagcacctcccactggcagcacatggccaagtgtagcaagcaatggagagagccgcagagtcccagccccagtgttcacagggtggtgtggggccaggaaataacagtggaattgtggagacaaataactttgtaaagggtagatgtgacccactgatacttattacccttacttctgttaagtgctcaggctaactgcttgctctctcttttttttttttttttgaaatagattctcactgtcaaccaggctggagtgcagtggcacaatttcgcctcactgcgacttccacctcccgggttcaagtaattcccttgcctcagcctcctgaatagctaggtccacaggcacgtgccaccatacccagctaatttttatatttttagtagagacggagtttcgccatgttggccaggctggcctcaaacccctggccccaagtgatctgcctgcctcagcttcccaaagtgctgggattacaggtgtgagccactgtgcttggccattctctcttttaaaaatagtttacactgggcacagtgtccagggaaatcgcttgagtccagggaagtcaaagctgcagtgagccatgatcatgccactgcactccagcctgggtgacagagtgagaccccat[173 bp omitted]ggcaggcgccctgtagtcccagctactccagaggctgagacagaagaatggcacgaacccgggaggcggagcttgcagtgagccgagatcgtgccactgcactccagcctgggcgacagggcgagactctgtctcaaaaaaaaaaaaaagtttacacggctgaatgcagtggctcacacctgtagtcccggcactttgggaggccaggagttcaagaccagcctgggcaacatagtgggactgtttctacaaaaagaaaaaaaaaaaagttacgatatggattagcagaggacataaacctcttgtgttaccagcatttaagtttttaataagtagaaaatatggctaaggactacattctattctataattataccaacatttaccctaaagttcagtgctgccttctatagataaagtgggctgggtgtggtggcttatgcctataatcccagtactttgggaagctgaggcaggaggatcgctggagcccaggagttcaagatcggttagggcaacatagtgagacaccgtctctacaaaaaaataaaaaattagggctgggcgcggtggctcacacctgtaatcccaacactttgggaggctgaggcgggaggatcatgaggtcaggagtttaagaccagcctggccaaaaccctgtctctactaaaaatacaaaaattagctgggcgtggtggcaggcacctgtaatcccagttactcaggaggctgag[131 bp omitted]gtggtatgtgcctgtagtcccagctcctaggaaggctgacgtgggaggactgcttgagcctgggaggttgaaactacaatgagctataattgcaccactgcacttcagcctgggtgacagaggcagaccctgtctaaaaaaatattaaaatgtaaagataaagtatatgtctgattaatttctgtaataatcagggctactattttatttgattggccgggaaagaccatcttagagaatgaagtgtgctgcttagggacaaaatttacgtgtaatcaactgttaagctatttgactcgtaagtctttgacaatacaatacagacttttatataacagtttcagtaacagttaaggccactatgcatctctttaaatgctgaaaaagttaaccagatttttctttgaaatgcaaaaccagtaagtatagtttcccgtcagatggggtgcacaatgacaacaggaaacagaggtgagagtgtgcacacttggtttcaatatgtttcaaagaaatttcgaggaaattcctacaacacagatgctttagttccactactgaataccacagcagttctttgtactctggtttgttaagaaacatggcatcaaacaacgaagcaaaagttcaagcacttagtggcacttttcgagtcagcaacatttacattataaagttcctttctccaagcttttacatgactatttttatacttcatttttcactccctgctctgtattatagctatgtatgtccaagtctgatcttctccatgaaattataaacttgagggcaaaatccatgtaggaatcctcttcgtgttacccctagtgattagaccagcacatacagaaggcagaaatagatgtctgtagaatgaatacacgaacaacaagatcttcggaagagtacagcatatgcccatggtgactctttagattttgaatatttgccccgcagactaaatggcagactggtacaattaatgctcacaaaataactgaaaaacacagaccaccatgtgtttttaaattaagggtttgtggagtaatactgagtaagcttgactagcagctgaaaccctctggttctgccagtgagttgtatgaaagactggaaaatgaagatgaaatgatttaataaaacaagtatgatatcaacagccagaagacacaggttcttgtttcagctctcccactttctttccttttttttttttttttttgagacagcatccgctctcttgcacagggtgactgcgatggccatcactgcagtctcaacctctcaggctcaagtgattctcccacttcagccacgtgagtaacagccgcgcgccaccacacctagctaatttttgactttttgtagagacgggacctcgctgtttcccaggctggtctcaaactccagagctcaagtgatcctcccgcctcggcctcccaacatgctgggattacaggcgtgggccagagcactcagccttctctcacttcatacacaagactttgggcaaataacttaacatctctgagcatcaatgtccttatctgtaaaatgagatttatagcttctgtctatctcatagggtcattaagatcaaataaaaatgttttgaaaaccatacagtgctataaaaatatatgttatcattagtgatccttagtgattagcattagtgataacatcttcattaaagaacttgtaatgctattttgaatgcttggaaaaaataatgcacaaatgaaatacaagcaattaggtaagtatctcttatctacaaatcccaaagcacttgaagtaaatacagttaggatatatctcacttggtcgtgacccagaagaattattgtagatctgccctatattctactggaatttaacatcttggaaacagctacccccaccaccccccacccacggacacatacaagtttctaccatagtgactgaaaggctctctgagattctcggtttaggatcactagggaaatggaagacactgtctaaggtaacgtgagagttaagcacgttctccttttgtctgttgtgaccctgactgtctaacaaacaaacgtgacttctgaagcctgatccgaaacaatcaggagctgagcgagaaaacaaaacagaggtctgaggcacagctcctgggcaggctctcccgcatcctgcagtgaggctgccgcacccatagtttcagatctgagattagcgcctggccgagggctgctgatgcaggagcaatgctgccctgctacccctcccacctccacatccacagacagccctgggggacacggctaccacttctctggggtacacgtccacaaacgggactccctggactacatgggaaccaggccacagagaaggcaatcacatttctattaatcacctctttccaaggcacattctgtttttttgttggtttgtttatcaaggtataatttatatacagtaaaattcagcctttttggtgtacagttctgtgaattttgacaaacacacacaacagtgtaaccaccattacaaacaaaataaagaacatttccattacccccacattcccttgtgccctctctagtcaactcctccatgcaccccagtccctggcaaccattgatctatttcttatctctatcgttttgctctttccagaatgacacaacactctttacaatgcttaagtaaaatagccaaaggcctcattcagttcgcatagaacaccacgcactcagccaccataggagactttcaaatacatcagaaatagtgaagccagtctgatggtgggaagggcggtaaattcactagagcctgagatgactctgcaggctctgctgaaagacccccgaaagcaggacgcttcttagtgggctgtgaagtggatagtttaaacccaaagacaaataactcatttaaaatagtctctatagaaatggcctatgtcctcttccatgattgtataatatacagtaccagacacgattaggtttccttccagtttagataactctgctttcttctgaattgctactaaaacaatagtaaagagatttaaaaagagagagagaaaaatataaaaccacaagagcaggccgggc[174 bp omitted]gaggcagcagaatggcgtgaacccgggaggtggagtttacagtgagccgagatagcaccactgcactccagcctgggtgacagagcgagactctgtctcaaaaaaacaaaacaaaacacaagagcagagggaatgggagaggatattataataaaaacttggaagctgaaacacacactgacaagtggaaagcgattcaggagaacagaaagggccgaaatcccaaatggcagaaacatattcatgtcacagaactccagacaggcttaggaaatggaggtgtaggtcctcctacaagcggggtagagcaaggctggaaacaggagactggggttggtgtgaaaagcatttagacccctagatctttttccagacaccacgtaaccaggagatcacctgtctctccaacttcattggttatcgggaaaatgaaaataaattctacaaacctaccacaatggctaagattaaaaagatggaaaatactaggtgctggacattctaaacactgctagtgggaaaaaaaaattggtagaatcactttgaaaagcggttagcggtatctactacagcatattctatgactcagcaattctcctagctatagccttaacaggtatgcatacatatacacaacaaaatacatgtaataatagaacgttcatagcagcactatgtgtaatagccaaaatgccccaaaaaagctcaatgcctgcaaacaatagagtggataaattatggtgtattcacacaatgaaatactatgcagcaatggaaatgaaccgtacacagcacaggaatagtttgttccttctcgttgctgtacgccattgaggtaggatgtaggacttgactcaagaagtgagactcaactccagaggtggggctcgcacatcagactaaattgagcacaagctaaaacagggactgggcagaagcagctttccataagatagcccatacctcccatacctgtcagtgtgtgccatgtcagtttactattgccacggcaacacctggaagttaccaccctctttcatggcaatgacccaatgacccggaaggtactatccttcttgaaatttctttataatttgtcccttaatttgcacataattaaaagtgggtataaatatgattacaaacctgctctgagccgctactctcaacacactgcctttgggtagccctgctctgcaggagcagtcacagagctgtaacactgccgcctcaataaagctgttttcttccaccactggctcttaaattctttcctgagcaaagccaaggaccctcctgggctaagctaccatgagataaataaatgtcacaaagatgctgagtgaaaggagccagacattaaagagcaaattgaacacagttccacttatataaagttcaaaccaggacagaagttaggattgcggttaccttaggctagaggtaacaacaggaaaggagcagaaggggagcttctgggggtgctggccatgtgctacttcttcatctgaatgctggccacagcggagggctcactttgtgaaaatcaactgtgcatggatgacttgtcatctttctgtgtgtatgttatacatcaataaatatttttaaagaggacaagtcagccctaggtaaatggatctagaatgatctccaatatgatacaccattaaattaaaaagcaagggccgaagtatgtacgggagtgtagtcatgtgctggcgtcccaaccttccccaactccctccccaggtctctgtacccctgctgtggagagttttggctacaaacagccatagctaccccttctccaagaactgggaaccagagccacctgatccaagagtcttcctgattccctatctcactccaggacagccaccaacagccagtgactgattgacagggctgtacaaaaagctggcccctttaccttgagatgaagcaactctgtggtacaagctgtactccaaagctttcccgtgggaccaggccaaaatgggtcttggccaagaccgcactcatgtttggttttgctccactgccccatctgtcttcctcatctctagagagcattccctcaataaacagctttcacaaagatctccatctcaggctttgctcccagagaacccaacctaaaccggttgatatcagatgttgtctatggatggaatttgggggtggatcacccacagccagatggcaatgaggacccatcactgaggtgggtggaaagtggatggtccccagcatgctgcagacattcccctgtggtgaaggggaataggagacacggggctgtataatatccaggcgattttgatgtcttggtacaggaggtacaggagaaacagttacagtaaggactgtgaaactgggtgactgctattaagaggactgtttcattgaaaagagaaaatgagtttcaggtatagcaatcaaaaatgtaaagccaactatgagcctggatgtggtggctcatgcctgtaatcccagaaatttggaaggctgaggcgggaagatcacttgaggccaggtgtttgagaccaccctgggcaacacagcaagaccccatctttataagaaaaactaaaaataaagaaataaagccagctatgatagtcagtaagcttcctttggcaatttttacttatttattaatttatttgagatagggtctcaatatggtacccaggcttggagtgcagtggtgtgaacatagttcactgcagcctcaaacttctgtctcaagccatcttcccacctcagcctcccgagtgctgggattacagatgtgccaccatgccaggctgctttggcagcatttaaagacaatcatttcctgcaggcacaagacctaattttaagagtggcagaatcaaaaaggatgaactctcagcctatactagtctactgtgccagattcaggccctggtagggaaggagtgaactctaagacttgagatgggaacgtctgtgtatatttatttgaggaacatgaaccccagattccctaggcttgcaaatagccctctcccttgaagatgggaggaacctgctcctccacccttcatgattacacagaggtctcaaatgaggcgagtaacttaaaagacaatgctcaccctacagaggacctgcccccaccttcctttctggccacccaaccataattagggccattatctgagtattactcaaccggggcctgctggacctgcaaagagaggagagggcttatcatgccagaggtgcttgggacctggccaacaaaggcactagcaggacctggaggatgtgtgggaggggttcctgagggtgttggaatacaaagttggatgagggagagcctgttgatacagggacattctcttatgacacagaatgaacaccttggcaagagccttggatctgatatgtgctgggggaggggggttcttgggagcttggaaaaatgatggaccacagtaattgattccaaaactgccacagagatctttagaggaaaagttcaaaaggcttcgtgtctactccacgagaataggtctgcacataaagtgggaaaatccactagctggctgcgtcctttggggggcctgaacatactctaattaccacaccctagattctgccccacactggttaccagcataggttctgccgtatacgtcagtgtcctcttcattccttctgcagcctgaggtcaaacctccatcaaatctcagttggacaactggttaccctgtatccgttctcatgactctctaatctaccttctacacttcatctgagagatcttttaaaatgtgtcttctgtgagccccagtttaaagcccattagtggttccccacacctacaggacaaaaattcgaagctcacagggaggcataccaggccccttggtccaggcctggcatctcagtcttatctcttgcaaagtctcctcccaccctctggatgccacacctgcttatgctgaatcacctgcagtgcacacaccgtctgttggtgagatgtctctgtgcctctgctcatgggccctcctccgacgtgttcatgtttcctagctgtacaactccttcaggcagggactgcatttcatcggtatttctagtgtctaacatcagcctggagaacaatgggtattccacagaatgtaaatgattgagggaataatgaaggagtgagccagttagtcagtgatttgtgtaacagagaggggaaagaagatcaaagttggcaacatgttatgatcatttaagaaaactatcttctcaactagtacagagaccagattaaaacatgaacaaagaagaaactattccttcctctactttctcttcctccttctcccagtgtacttatattccaaattggttttggctggagtgcagtggcttgatcacagctcactgtggcctcaacctcacaggctcaagtgatccttccacctcagcctcttgagtagctgggactataggcacgctccatcatacacagctaatttcctttattttttgtagagggtctcactatgttgcccaggctggtcttgaactcctgggctcaagtgatcctcccactttggcctcccaaagtgctgggtttatagatgtgagccactgtgccctgccaaaagcagctgaaagttaaaaaaaaaaaaaaaaaaaaaagaacagctggcaggaagagccacatcaatactaataggtataaacactgattcaacttctctgggagtgccccttcttatcactggtgatctcaacgtgaagtgtgactgcacttggtgacgcagctcgctggtctccatcctactgccacctgctcatgctactgggaccccgtctctctgaagatccacctaccatagaaatccaactccataaaacagagggataatgtcctcatctttattaaggatgaaaagtaatataagttgaataaagtgctttttgtaagaacataaaaacaagttaaatttcaaaactgaa[187 bp omitted]gtgtggtggcgggcgcctgtagtcccagccactccggaggctgaggcaggagaatgctgtgaacctgggaagcggagcttgcagtgagccaagatcgcgccactccatgccagcctgggcgacagagcgggactccgtcttgtcaaaaaaaaaaacaaaaacaaaaaccaaaaaaaaccgaggcatttcttccctagcccaatagccaaaaggcaggagcaacccaagtgtctgtctattgatggatgaatggatatacagtgtatcgatataatggcatattattcagccttaaaaaggaaattctgacacatgctacaacatggatgaaccaagcacatgccaagtgaaataagccagtcacaaaagaacaaatattctatgattcaactcgtatgaggtacctagagtagtcaaactcatagaggcagaaaacagaatggtggaggccagaggctggtaggagagggaaatggtgagtcagtgtccagtggggacagagtttcagttttgtgagatgaaaggagttctggagactgtacaacgatgtgtgatgagcagggtggtcacccctggggaaggcgtggaagtagggagacatgtattataagaatgccttaagtgaaactctttaaagccctaaaccattttaaaagtatgaatattcatcctctagttcttttactgtcaggttgctgaaaagcaggccacttccatactgaatctcataccatttcgaatcaactgtttctaaaggtgaattactgcatgttggcaccaagaggaccgagctccctgactctcctcctccccatgcttactctggttttctgtctttctccgcaagcccccagacacttcctggcacacatcccaaccccagcgagcagaccctacctttcctgtagttcactaaaaaattaaaaccattattttgtgaactcccttaattttcctacttctaaatattcttctaaacctatttccttcctctacttagaagtatttccacctctatttttaaagaaaattaaaatacttttcatttaaaaatgaaaacacgttcactggaaaaaattcaaacaacatagaagaatatgaagagccgggcacagtggctcacacctgtaatcccagcactttgggaggctgaggcaggaggattgtttgagcccaagagttcaagaccagccttggcaacatagtgagaccctagtctctacaaaaaaaaaaaaaaaaagagaaaaagaaaaaattttaaattagctgtgcatggtgtcatgtatctgtagtcccagctaccaggaaggctgaggcaggaggactgcttgagcccaggagttccaggttacagtgagctatgattgcaccactgcactccagcttgggtgacagaacaagcttatttctaaaaaaaaaataaagaaaattttagaaaatatgaattaagaagtgaataccccccttcttgatatatcccaagagttaccattgttaacagttcaaaatgcattgtaatagtatatttgtgtagctataaatatatgtacataatgcacacacatacatatattatttttatccgaaatgaaatcagactctacattatacactgcaacttgctttattcagtaagtcatgtggttgtggacatattgccatctcagtggacgcagatctatctaatttttgctgaataacagttcatggcataggcacattataatttatttaaccattccactataatggccattagatattttctaattttgcactactacaagtaatgctacaatatacattgtaaataggaatcatttcacactcttcaaaatatttctgtaggagagattcggagaggtgaaacagttgggccaaagggtacgcacagctcaaaatttaatcaatatttccaggctaaaggacaaaaaaaaattgtagtaaaattataaaggaaggaagaaggaaagaagatagcatgcaaaaggcaaataacccaatctcagtttctctctctctctctctcacacacacacacacacacacacacacacacacacacacacacgtgcatgagaaagacacccgttcccaccatgggctttaggcctgtagggcagttaagtgccaggtccttgtgatgtgacctattaggccagttactccaagtccaaggcacaaataaatctccaaacataacacgtgcacagcatctggggtaagtggtggcctctcacagaggctgttccttggagtgtcctttgcctcaactcacactgctgcaattctctaatctgcactgcattcattttattttctgttttttagacacattttagtctgatcacacatggtccaagaacacacaagtcataaatcaaatgtaatcagatgttaaagatgggtcttcaaagattacagcaatgatgccacacttgcctgtgagctctctgacataaaatcacgtccacacctcatgtgtggaccacatcattcagcaaagcttccttaactgtgagctattagagcgctactattttttttttcaggctctgaatagttctagggatctcaccaggggttggaggaagcagctcagccttggcatagtaccaaaaagtggccaatcgaggcttcaaacaagtcacaacaatgatcatcagccctggggccttctctgcaaggttataaattggtccatggttctagggtagaaagtctgcaccatgtttatttgcaatgctgttaatcctattcagttatttcatgtattttttcttaaaataaattacttcctaactggtcttcttattttctgtctctctgattcattacctatactgtgaattaatttatagaattaattttctaaaatgcaaattagattgtaatagttatctttttttttgagagagggtctcgtccagcccaggctggagtgcagtggcatgatctccgctcgctgcaacctccgccttctgggttcaagcgattcttatgcctcagcctcccaagcggctgggattacaggcatgcaccaccatgcctggctaatttttgtatttttagtagagacagggtttcgccatgttggccaggctggtctcaaactcctggcctcaagcaatccacccacctcagtctcccaaaatgctgcgactacaggcgtcagccatcaggtcccgccatcattttttgagtccttaaaatattcctgcaaggtaattttatagatggggaaattgagactcactgattggccatcgtcttaaccaacatgacaaagtcagtcagtggcaaagccattcatgactatgacctttactgccatagaaggaaaagtaaaaactttttttttttttttttgagatggagtcttgctcttgtcacccaggctggagtgcaatggcgcaatctcagctcgctgcaacctctgcctcctgggtttaagcaattctcctgcctcagcttcctgagtagttgggattacgggaacccgccatcatgcctggctaatttttgtatttttgtagagacggggtttcaccacgctggccaggctggtcttaaactcctgacctaaggtgacctccccgcctcagcctcccaaagtgctgggattacaagcatgacccacc[137 bp omitted]tgcctc[224 bp omitted]gaacccaatttgtctttccagcctcaactccaaccagcatccctcacagtccaatacttattgactactcaccactctgagcgccaaaagcacacttctgcatctttatgcttccttgtattgcttattaattaattctgcctcagatgcctctcctcatctcccctacctaggaaatcctacttatccctccaggttaaaggagtcccctcccagaagccccttccctggagagagggcatccccactggtctgtgctccagggcactctggtcctctctcgtagaacctatcacagtccctcgcagtgggggcacatcagctgccccactctgcagcaagcatcttcaggtcaagggtcatgtcttttcatctctgcattcctagttcccagcacagtatgtgactcataaatacttgttgaatgaatgaatagcaccgggactaacagaatcatgttctctttttttgccacaaagctctataagtgcaaaactctatgttacaaatggatatactaccaagttcctttaaataacttgctcttcctgacacatatgataatagggttcaatttacagaaactggatttgagtacaacttttggtctatctgtactagagaaagaagaaaagtacactgtatgcatcttatttcttttctttctttctttcttttttttttttttgagactgagtctcactctcactctatcacccaggctggagtacagtggtgcgatctcggctcactgaaacctgtgcatcctgggttcaagcgattctcctgcctcagcctcctgagtagctgggattacaagcacctgccaccacgcccagctaatttttgtatttttagtagaggcagggtttcaccatgttggccaggctggtcttgatctctcccgacctcaagtgatccacctgcctcggtgtcccaaagtgctgggattagaggcgtgagccaccatgcccagtctccttccttcctccctccctcgttccctcccttcctcttttcttttctttttttctttctttttttttttttgacagggtcatgctctgtagcccaggctagagtgcagtagcataatcatggctcactgcagctttgacctcctgggctcaagtaatcctctagcctcaaccacccaagtagctaggaatataggtgtgtaccaccacccctggctaatttttttttgtagagtcggggttttgctatgttgcccaggctggtctcaaacttctggcctcaagtgatcctcccgcctcagcctcccaaagtgctgggaatagggataagccgccatgccgggcacattttagttcttaaaataatgccagcggctgagcgcagtggctcagccctttgggaggc[134 bp omitted]gaagcagaagaattgcttgaacctgggaagcagaggttgcagtgagccaagatcgtgccactgcactctagcctggcgacggagcaagactccatctctaaataaataaataaataaataaataaataaataaataaaataataatgccagctgtgcagctctgattgcagggagcatgaggaagaagaaactgtgtcaatgcggcccagctacagaacacacgagaggatacagactattaggaactaggttaaaactcaactactttccttataaaatgagaggagcggtttgaactcctgcctacaaaaggcaggcagaggtggggcacagtggctcatagctataatcccagcactctcagaggccaagacaggaagactacttgagcaaaggagtttgagaccagcctgggctatgtagtaagacattctctctatagaaattttttttaaaaagccaggcatggtggggcgtgcttgtagtcccagctactggagaatctgaggtgggaggatcacttaagcctaggaagtcgaggctgcagtgagctgtagttgtgccactgtacctcagcttgggcaacagggcaagaccttgtctcaaaaggaaaaaaaaggccaggaaggagtcaaggcattacttgactaatttctaagcctctaataacttagagttgggcagtaattatcccaacaaaacaagatctaactcaataaaggagcagaaaagcaacaccagctcttctgccacctaggaagggaagggatggtctttatttaacattttgtaactgattcacagataccttagttcctttatataagggaccagagcagaaagaccttcagaagcccagtttactacttaagacagtatttaaaaaccagtgaagaggccggccaaggtggctcatgccacctagcactttgggaggccgaggtgggtggattgcctgaggtcaggagttcgagaccagcctggaacaacatagtgaaaccctgtctctactaaaaatacaaaaaattacctgggcatggtggttcgctcttgttgcccaggctggactgcaatggcgtgatcttgggatctcggctcactgcaatcggctcactccagcctgggcaacaagagtgaacctttgtctcaaaaaacaaacaaagaaaacagtgaagaaccctacctagaatgacaagtagctgtagaaataaccaactggaaaggtagcaagtatagctaacattgctgcatgctgctttttgtccagcaattacaaggaatcttccaagcattacattattctaaagtcagaactacctccatgctacaagcaggtaatctgagcacctgagtgatacgtttgccaaggttacaaagagtttaatggtaagatataaataaaacttgaaatctagattccaactttcttccaccatctttctgtatatacacacactctagtttctttaaatctgacccttaagacttgataataaatttggctttgggccgggcttggtggctcacacctgcaatcccaacactttggaaggctgaggcaggaggactgcttgaagctaggagattgagatcagcctgggcaataaagcaagaaagaccctgtctctacaaaaaaaattttaaaaattagcccagtgtagtagcatgcacctttattcccagctactcaggagactgaggcaggcagatcatttaagcccaagagtttgaggctgcagtgagcaatgatcacgccactgcactccagcctgggtgacagggcaagtccctatctctaggggaaaaaaaaaaattggctttgatggattatcctaagtggtagatctgtggtgcgaagtacagctcagtcaaatgacaaactttttagtctgctcattcagaaatgacagggaattgcacaagccaggaagtctatggcatttatagcttaatataacaattcattttaacatatttcactgcccatattcactctctctgcaaagaggagtcgttcttgccgcatgctgctggatggctttaaaaggttgttctctttcttgctcccctgtaacctaacactcatgtgctgacacccaagatcttttgctagagagtggaagtcagctgtttagaactcaagctacatgtcaatcttcaatctctgagccttcccctaaacaagcatgttgtgcagtaatggcaaaacccagaggtcagctcagcagatggaattacacatggaatacgaactctgaagaggcgctccaagagaacatatcactgccactcgtctacttttatttatttatttattgagacaggttcttgctctgttgcccaggctgcagtgatcatagctcactgaagccttggcatcctgggctcaagtgatcctcccacctcagtctcctgagtagctgggactagaggcatgcaccaccacgcctggctaatttttatcattttatattttgtagagatgagggtctcgctatgttgcccaggctggttttcaatttctaggctcaagagatctataggcctcggcctcctgagcagctgggactacaggcatgagccactgtgctggcctcattccactttcagataccaatatttcagaaattgcacttgaagatctacacaatggactcacaaacaggatgtgggcagagtttctgagtacacctggcctaattagcaaaaatggcagcatggttcaggctctggagccagactgttaggttccaatcctgatcccttacaggctgtgcagtctttaaactctctgtgccacatgttcttcacctgttgaatgaggacctttttcatcatgatgtgaggacaaaatgagacaacacagatgaaaagcttagaacaatcagccctggcaaaaactaggtgttcaaatgttagccatcattattattatcaaataacctgtggggaaaagaaaaagagaaacatgtggcatttattctctatactacatttttatgcagctatatgaagttactctgatttgctttcctaatataaaattatgtcttttaaaaacatttgccagcgcggtggctcacacctgtaatcccagcactttgggaggccgagatgggcagatcacctgagatcaggagttcaagaccaacctgtccaacatggtgaaaccccatctctactaaaaaaacacaaaaattagccaggtgtggtggcaggcacctgtaatcccagctagtcaggaggctgaggcaggagaatcacttgagcctaggagactgtggctgcagtaagccaagatcgtgccactgcactccagcttgggtgacagagtgagactctgcctcaaaaaaaaaaaaaaattcatttgctatgtgtaacattaagcatacttaatgattactacataaaagcaacaacaaaaactccaatgttgatgttctttttttttttaagtggcatttattgattgattgattaagatggaggtcttgctatattgctcaaactggactcgaattctcctgggctcaggtgatcctcccatctcagcctcagcctcctgagtagctgggaccacaggcacatgccactgtgcccagcttgatcttctttgggaaaaagcctcaactttaaggttaaggctgctacctagcatttcagaaagagctcagtcattcataggtcggcataggcaaacttaggaaaagtctgccagccagcataaacttcaagttgaacctaaagcagcatttacttcaagcttgtccaacctgcggcccaggggtagatggcttttaatgtggcccaacagaaactcgtaaactttcttaaaacattgtaagatttttttgcgtttttttttttcttttttagctcatcagctatcgttactgctagtgtattccgtgtgtggcccaatgtgacaattcttcttcttccaatgtggcccagggaacccaaaagattggacatccctgatttacttatttttatatcatctttatggactgaaaaggccaaaatttttttaaaaatatataaactatctttacatcagatgaaaggaaaaagacagaaacagatgcaaacatcaagtccatgttattaatagaagaaacggctactttcatttttgtttttgtttttttgagacggagtctcactctgtcgcccaggctggagtgcagtggaatgatcttggcttactgcaacctccgcctcctgggttcaagcgattctcctgcctcagcctcctgagtagctgggactacaggctcacaccaccacgcccagctaatttttgtatttttagtagagatggggtttcaccacattggtcaggatggtctcgatctcttgaccttgtgatccgcccgcctcggcctcccagagtgctgggattacagacatgagtcaccgtgcccagcagaaagggctactttcaaagcacaagctgactccctgtgagtgaggcaacatttttatctggctctatcagaaaaaaagaaagatctgtctactctaattaccaaggcagtagtaacaaaatcaaagagtagacatctgataagtattacttgacataacttaacttgaagcagacaagatttggtattttgaaaagtgtactactggacgaaaaattagcagaggggtcactccagatagaaaggaagagaacccgccgggcgcagtggctcatgcctgtaatcccagcactttgggagg[133 bp omitted]gaggcaggagaatggcgtgaacccgggaggcagagctttcagtgagccaagatcgtgccactgtactccagcctgggcgacagagccagactccgtccaaaaaaaaaaaaaaaagaaagaaagaaagaaagagaacaatgaaaaccaaaaaaataattatttttatgttaaaggtcaagatggaagaccatcatcagatcaatcttcctaaaaaagcaatttctccaggtcactcacctacctacaagtcttaaatattcctcacggtctacaggagagagtaaaaaacctatcaaggtaacacagccgccacctacctttctcttttttttgaaacagagtctcattctatcccctaggctggagcgcactggggcaacctcagctcactgcaacctccacttcccgggttcaagcgattctcctgcttcagtctctggagcagctgggattataggggtgtgccaccaccccgggctaatttttgtgtttttaatagagatagggtttca[131 bp omitted]cttatttgttccagggaagaacaaaccatgctcatttcagctctgtatccacagcgcctatcacagtacctgacacgcagtagttgctcagtaaatgtttgccaattcaacaacttgaatgctcttaggcctgtgccgtgctctactcctggaaaggcctcatccaacccaccattcttcaaaggccagttcaactccctgcacctcttcccagtgtaacactgaagcaacctgcccttgccattgtcttctcccactctcaattcccaccacattcaatcacttctgatctttattgttaattaaacatttcctgttttctgtgttttgtctgctccaccaaacttgcagaatatttcaaggcagtgaggagcactggaaagattactgatctgtgaccaggcaaacctagttacatgactttgagaaaaatgtatataaaacccttagaacagtgcttagaacatagtgtgcacttcctagcttctgtcattattcatctctctgaacacctcagttctctcgcttataaaatagagtgataagtcctaagtcaagtggtcttcatatggaacaggggtctctaggaccttcctagcacacggtagccactcaatagccacctggcggctattattacaaagcctcctgcatgatgcagagaaggtgcgcaatagaaatttatgagaaggaacaagtgagagaaatgtattctcatatcaactcatatatcaagagaaaaattttcagtcattcattcaacaatcatttattaagggcttaacattacgtgccaggctttgttctaggtttgggatactacagtaaaaacagtccttgccttatgaaacttacgttctagaggaggaggcagacaataagcagagaaagagacaaatcaataaaaggttggtgttaagtgccatgaagaaaaaaaaaaaaggtaagcccttggaaaagggttgcctaaagaggtgacagggagagatctgtcctagcttaatttgtgagactcatcctctccctcacaagactccaggagctcttccagtcctctagcaacaagagatcccatacaaccaaggaggctgcagtttgtcttctagtgcatctctctcaactcagaccaagctacaaactgctgaacaagcaactgcaaacttatttttgttacattttttgaattggccacttaagctccaagtaggagtaaactgattacagccataccacaactggtctgttccccagaaagttcagatcgctgttctctccaaacaggtaaccttcaggatgagttgagtcaaacttctctcctcccataatgaagtggctggcaaaatagcttcctagagaggaacaaacaaaaaaaatcaaacaagcagaaaacagtcaacctaaatctagtaaaaaaaaaaagctgatttttaaaatgttaaccttttgggctgtgcgtggtggctcacacctgtaatcccagcactttgggaggctgaggcagacagatcgcctgagataaggagttcgagaccagcctggccaacatggcaaaaccctgtctctactaaaaatgtaaaaattagccgggtgtggtggcacatgcctgtagtcccagctactcaggaagctgaggcaggaggatggcttgaacccaggaaacagaagtgcagtgagccgagatcctagcactacactccagtctgggcgacagagtgagactctgtttcaaaaaaacaaaaacaaaaaagttaaccctctgaatgaataattagagcaatttctaatcccagagtgttttcttttcctgatttgggacaatggcacaaaataagtaaaatcatagcagggaaaaccccagataccaaacgtagactagatcactgttttccttttaacattcttaactgaattcttctaatgatctgtttaaaatacctccagccaaaagaccaaaaggttctacaatgcacattaatgatcatatatattttttggttcctgacttttgcctttaaacttgaagtagttattccatgtattgaagaatctcagctacaggtatcggcatatacatacactgtgatattgtaaaatatatgtttgatcttcaaccctatttcctggaatgcaactcttaaaatccttggaatatccaggccggcatggtggctcatgcctgtaatcccagcactttgggaggctgaggagggcggatcacttgaggtcaggagttagagaccagcctggccaacacggtgaaaccccatctctactaaaaatacaaaaattagccaggcatggtggcatgcgcctgaagtcccaggtacttgggaggctgaggcaggagaatctctcgaacccgggaggcagaggttgcagtaagccaagatcacaccactacactccagcctaggtgacagagcaaaactccatctcaaaaaaaaaaaaaaaaaatgcttggaatatccaaagtgatgtcttttttttttgtctttacatatgctaatgaattaaccactgcctggcagcccctaggtagcctcaggatggcggctggtcactggaaagaaaaggcaggattagagggtggggactttcagcccatcccccaaccactgaggaagggagaggggatgaaagttaagttgatcatcaatgtccaatgatgtaatcaaccatgctatgtaatgaagcttctataaatacccaaaggactggttcagaaagcttccaaacaggggaacacttacaggtttctggagggtaacatgcccagagacggcatagaagctctgtgccccttctcacataacctcgccctatgtatctctctctgtatcctttgtaatatccttgataataaactcgtaaatgtgtttctctagttctgtgagtccctctagcaagttaatcacacccaaggagggggttatgggaaccctgctttctggttggttagttggaagcacaggtaaaacaacctggggcttgcgatgggcatcagaagtggggggcagtcttgtgagattgcaccctcaacctgtgggatgggacactatcttcaagtagtatcagaagtgaaatgaattggaggacacccagctggtgtcctctgcagaactgagtggttgctggtggagagaatccccacacattttgctgaccagaggtcacagaagttttctgtgctgcttgtgttgtgagtgtataggagaaactgagtttttttcctatatccgcagacgcacacatttctttgcctagattttcataagccagcttatacctacacacagaagtctcagtacccacccaccactactgctatacctccataaccttctatgatgaaggttcttcacactttaacttgctgcaaacattattgtttcacaggaaaatacgaatttagataatacagttatccctggctttctctaccaattactacacagactatggtgtaaaataaggggacaatttaatgctatgaaagaaggctacacacataccctctccacctcaaattcattaacagtgctaatggccagaactgctgggacatcagtcatggcagggcccctttgccccttcttaatcagccaggaggcagaaatattttcagtgcaatataataaccaaatgaaatcagcagtcaggggccaaaattcccatcagcctcatccggacaaaccaaggaactgtgacaggatatgatggaactgagaagtcaccaaaggaggcttaggttatgctgaaaattacatctgggaatacattttaagtttgatgattaaacgaatgccgcttacctctaatttctattatctaattctcccatgaaggtaagctgtccaaagtaaaggacacatcccataatatacctttatcaacactctcatataccccatttctgaaattaacacaaggaacttattaagtggcaaaaggcttgcttgtgtataatacattgaggatatacacaaactccctaaatcagttgcaatttttgttgaagatttgtagcaggcagggtgtgatggatcttgcctgtaatcctaaaactctggatggctgaggcaggagaattgctttaggccaggagttggagaccagcttgggcaacttagcaagcttagcaagaccttgtctctactaaaaacaaaacaaaaaataaataaaaatacaaaaattagttgggcatggtagcatgcgtctggagttctagctactcagaaggctgacgcagaagggtcgcttgagttcaggagttcaaggttgcagcgagctatgattgccactgcactccagcctgggtgacagagtgagaccctctctaagaaaaaaaaaagaaagaaagaaaaaagaaaagaaaagaaaaaaggaaaaaaagatttatagcaaactaaaaaaaaaaaaaaaatgagattcagtactttgagcctgtggagaagccataggaaggaagacagagaagaaaattctagcaaaaactgaaccaaacattcatttttaaaactttctacacaaggagctttagtctagaaacatctattaaataaaacaatgtggataaaatcactcaccacaaagtgaggcaactattgaattaaacaagcaggaaaacattctttgagagtaataatgcaacccagatcaaagcaatcactgaggaactactgaaagtcacccattaaaacttaaaaagacaaagggcagccatctgatacagtgatacaacagcagaattcatcatttaggaaagcttaattatcaattatttatgtctggcacttgctagccctattttccaagtgcataatttatggagaggggaggtacctagttgccttaagtagaagcagcaatctcaaataatttaagtcatttactgatgaacttcagcaagatatattttctatgcatcaggaattatacatttatcatatattaggtaaaattggaaaagttaaagatgttacacagatggatggcttgcccaaatcatgaaaaaagaaagggagagaagagagtttgatgtctggaattgtctaggttgacctcagtgtgggaccactgagtttccagtacctgtgagatctcaggggagggatctggggcagtaaaaatccatggatgattggcttagaggtggccatgattgaacctagcgagagaggacccctaatgatttgggggctaaagagttaaagcaggcaacagggttcgattagaaatgcccttttatgccataatattaaaagaaaagaaatgaccacaaaagatgtgtagagctaattgtagttttgccttgcattaaaatcaagaatagtctgggtgtggtggctcacacctgtaatcctagcactttgggaggccaaggtgagaggatcacttgagcccaggagctcaagaccagcctaggcaacatggtgaggctctgtctctgtatatttaaaaataataataataataatactatggtatattcagtcagtagagtattatgaagcctttcaaagtggtgttgtaaatctatatctactgacattaaaaatgttcacaatatattataattagacccttgtctcgacaaaaaattaaaaaattagctgggtatgatggcccaagcctgtggtcccagctactcaataggctgaggtgggaggatcacttgagcccaggaggtcaggcctgcagtgagccatgactgcgccattacattccagtctgggtaaaagagcaagaccctgtgtcaaaaaaaaacaaaaacaaaaacaaaaaacaaacaaacaaacaaaaaaccccataaaagctatataagctgtatacttataactgggaatgattttctcaaaattacaaagttggcaaaattgttcttacttttacttaaaattagcttgaacacctgttcaatcactcaataattctttagcaatattaatttctaaacttttggttattaaggggaagacgcataaaatgtgcaagattgtatgaattaaaaagagctccccaaaccttcatctattttttgtttgtttttgtttttctgtagagatggagtttcaccatgttggccaggctggtctcaaactcctgggtcaagagacctgcccgcctcagcctcccaaagtgttgggattacaggtgtgagccaccgagcccagccatcctcatctgttaaaaggaaaaataaatttacttattggtatttcattttacaaccaaaaatttgctttttcctttctttgaaatgaacccctctagcagcttgctttcatttagacaaatgagaaaagcaaatcagcctttttcagactgaataaagctttctacttgctcagtctttctagagggacaaattggtgcacagctatgtatagctactagatcatcagataccaacaccaaacacatcaacagtccccaaacaagatgacttttagacagcttatgcatatttttacttcttaacacaatgaactgtgcttcaaaatcagtggtgggggaaaagaactctactaaagtacttctttgcctatttgttaccaggagaaacacgtcactcacagataaactgcagaactcaactaaaatacacccttgcctatttgctaacgggaaaaaaacatatgtcactagtagataaacttcgagtgtttcattattagtgagctataatttattaatcaaaactcatattcagaattctttgcaggctttaaaaagtcacatcatacacatatctccaagattatacgtaaaccgtaaggtatgagtgggaaggagaaaggggaaattaatgtttaacaagtacatagttttagttttataaaataaaaaagttctagacatctgttgcaaaacagagtgaatatatgtaacactaatgaatgcttaaaaatggttactatgattaaatttaacgttatgtgtttttttgccacaataataaacacataaatatcaagaaaaaaaaccaaaaggtatgagccagaatgatcaacactaagacaagttcagtaaaatgactgacctttaaagaaagaaaggcacccaggcaaaaagtcaaaattctagaggggaagaaaatcggtgtcatcagacttttcaacagaaacactttatgtcagaagacaagggagtaacattctaaggtagtcaaagaaagaaaagcccctgagctcatctgaggagtctactaaggaataagcttccaggccaagcccagtggctcacgcctgcaatcccagtactttgggaggccaaggcaggaggattgcttgagcccagaagttcaagatcagcctgggcaacatagcaagacctcatctctacaataaaaaaattaaaaagttagccaggcatggtggcatgtgcttgtggtcctagatactcgggaagctaaggtgggaggattgctggaggtcaaggcaggagtgagctatgatcacacccctggactccagcctgggcaacagagtgagactctgtctcaataaaggaaaaacaggccaggcatggtggctcacacctgtaatcccagcactttgggaggccaaggtgggcagatcaactgaggtcaggagtttgagaccagcctgtccaccatagtgaaacttcgtctctactaaaaatacaaaaattagccgggagtgatggcatgtgtctgtagtcccagctactcgggaggctgaggcagaagaatcacttgaacccgggaagtggaggttgcagtgggccaagatcacaccacggcactccagcctgggtgacagagcaagactccatctcaaaaaaataaaaaaaaataaaaaataaaaacaaagaaaatacagtacagctctcaaaaaataaagaagggggatggatagcagagaaaaagcagaatatgtttgctgacaaactttaggtgtaagtgagagtcaaaggagatacttcaaatgctggagtaaagaggagaggtgagtgaagaggttactagttatatccatattattcacagtaggaaactaacagacaaaaataataataataacaatttaacagcagtatataaagattaaataagggtaaccattagagaaaaatacaaaccttcctaaatccaaaaaatacatcttaaaaaaagagcaaacaaaacagactacataaagactatataaatttttacatatatttatatacatataaatataacataaaatggccagccttaagccaaacatatcaatcatatcaataaatacaaataggcttaatttatattatgctaccatgtgtgtaaggaagagtggctatgaagatatatacatattaattaatatttttaaaacaagcaatgtaaggataaatcataataatcttaaagtgattatctataggaggagggagggaacgaagtagaagggaccagacagaaggtagatttctttgaatacgcattgctttatgtatctaccactggaaccatgtaaacattttacataattataaaattaaaatttctgtaaagcaatccctaaaaatcaaaagtaaagtgaaacaaatgaacctaggtgtgtgtgtagtggaataactacagaaagagaaactattcccaagaactttaagagactgtaatttaactgtacatctcaataggaaagaaaactgcgaaaaatatatctcaaacagtttacagtaatcatattattggtgacagtattttcttccgagaatgtggcattaagcagatgagtaattatgtgattttcaattttatcatacctagcgtattgagaatcagagagaaagttaaaaaaagccaaggttaaacaaaaaccatatagtcctgaatttgtattagaaatatcaataaaaatgcatgatgtgtattttatctttacaaacaatgtttcctagcttgggccactgaaaaggcctagaaacatagaccaacaaagtaggagggggtgccgctagcatccagcctgtaagtctgcaaaagtcattccccactaacaggaacaagggctctttggaggccacattccaagtctgtggcaggaaatacacaagatgggactagaacatcttgtcataccagataacaaggacgctctctaaacctactagggtcatatccaagggactcaagagctgacttaaagaggttcccgcagagcaaagatggaatatattaagcttcatcaggataataagggcaaggaataagtctaagtcaatgagttcgtaatgatatctaaaaaaaaaaaaaaaaaaaggttacctttgaaggatgctagtaaaccaattcattattttggaaactagcaattaaagggaaagcctcaagcatttatcttgcctttcctacatgaactgtacctctgggtgagtgaataattaatagatgaggggaggccgggtaccatggctcacacctgtaatcccagcacttgggaaggccttgagcccagaagtttgagaccagccgaggcaacatggcaagacactgtctctacaaatttattatttttttttttttagttagctgggccaggcgcagtggctcacgcctgtaatcccaacactttgggaggccgaggtgggtggatcacgaggtcaggagtttgacaccagcctggccaacatggtgaaaccctgtctctactaaaaatacaaaaattagctgggtgtggtagtgtgcacctttaatcccagctactcaggaggctgaaacaggagaatcacttgaaccggggaggcagaggttgtagtgagccgagattgcgccattgtactctgacctgggcaataaagtgagatgctgtctcaaaaaaaaaaaaaaaattagccggcttggtggcaagggccttggtcctagctattcaggaggctgaggcgggagaattacttgaactcagtaggtcaaggctgcagtgaaccgtgtttgcaccactgcactccagcctgggcaacagagaccctatttcaaaacaaaaagaaaaggtagatgagggaaagtttctctttacagaaatattctagctaataaacaaagaaggaatgataggattagaatgtaagtcttaataaattaataaatcatccattaccaaacctctcccccacaaaaaagacaaccagatacacgctagtgacagcaaatacaacaaagtagtcttaccaaagtaagtagcttcaaattttaaagctttaaaaaaaatgaacttgatcaagctgctgaaaccagttaaccaccagcttatagggaataaaacagaacatgattaatgagagttcaaggaggcaactggcaaaactcaggctgcagaaaaccttaacaagaaaaatgaccaggtttcctcaaagaatatattgtaaggggggaaagtatggcaacagaaaatccaaagtacagactttattttattaaaccctttaatttccaaatattttactgtatacaatcaacaaaaaccaggactttcttggtaccagctattgttcatgctccttcattggttcttctaaaataactataagaaataaaatacaaggaaataatagatgtttaaatcatatgggttcacagaagtactatttataataatcaaaaggtggaaacaaatgtcaaacaacaaatgggtaaacaaaatgtgaggtataatgtgtccgacatatgtccttacaacggaatattattcagccataaaaagaagtgaagttctgatacatgctacaacatgaatgaacctccaaaacagtatgctgagacaaagaagccaaacacaaaaggtcacatactgtagtatgattccatgtatatgaaatatccagataggtaaatccacagagagagtagactggtgattgccaggggatgggggcaggggagagtggggacaaactgcttaattggttttattttgaggtgataaaaatgttctagaggccgggcgcagtggcgcacaccttttgggaggctgaggcaggtggatcacttaaggtcaggagttcgagaccagcctggccaacatgaagcaaccccgtctctactaaaaatacaaaaatgagctgggtgtagtggcacacgcctgtgatcccagctacttgggaggctgaggcacaagaacagcttgaacctgggaggcagaagttgcagtgagctgaggatcgtgtcactgcactccagcctgggtgacagagcaagaccccgtctcaaaaaaaaaaaaaaaaagttctagaatagaggtagtggattgtgcaacactgtgaatgttcaaaatgccactgagtcgttcactttaagataattttatgttacgtgaacttcgcctcaattttaaaaaatcacatggggaggaagaatttggcacagtcaggttataatgctgtcatttgaatttttattttaacttccaagcatgtatcgtaagcaagatacagaactttaccaaaattatccctgattttcatctgtaagatattctcttacgtccatttttcagttgaggaaactaaggattagaagagttcagtgactcacacaacgtcccacagttaagaaacagcagagaccgagagatgcaaggtttgaaccgaaggtctggctaactccacatctcaaccctgcacctgtctctccatctgacagtggcaaagaatagcatgtgtgtgagagaaatgaaatcaaacaactgtgtgtgtgtgtaaatgtaa[133 bp omitted]ctcctgggttcacgccgttctcctgcctc[134 bp omitted]ggcctcccaaagtgctgggattacaggggtgagccaccgcacccggccttttttttttttttttgagacgtagtctcactctgtcacccaggctggagtgcagtagtccaatctctgctcgctgcaacatccgcctcccaggttcaagtgattcttctgcctc[213 bp omitted]tcttccttttcctgtactgtaataggaaaaaagaaagagggataatgaattgatgataaaatgcttaaccatataaaacccaaatttttttctttctgacaaacaggaattgtaaatcaaaccccttagtctcaaaaacattttgttttccacataaacgttaaatattgtgttttacatatctagtggaagaaccactaagttcaacgtacagcctccctgttcagaataaaatatggaatataatgaaacaaaaaaccaaacagactgcactgcccaactttatatttttggaaacaaaagcaaaataactctgaacctcagtaaaaaatgttagaacatgcagtgttttcaacacatacacaattcatatacaactttgcagagcaccatcagaaagaagtaagtataataacacagggcaaggcccacactggccagagcagctccagacactactccttaacatctgactttatcttagtcactatcagcactttctggctctacaagaactcagggcaatgcaaagggaacttgcattacactgagggagccctaccctatcaatggcaatttttgaagcgaaagcccaaaatcaataaattgacttcaacaaaggaaaatcaactatttgttccttataatgtgaacaaaaaagaaaaatctcatttaaaattcattgtattaaataatttgcctaatcattttgaatttaagtttttgggacatattcctaataccacagtgaaattaaatattgagcaatgggttccctaaattatgtctgcctcaataagatattgtgacatttgttagcaaaccactatgaattataacaacatataataaaggacaattaaacccattttctattcttctacaattctatgggaatctataggctatgggaatcctagtaaattttcatatatttgaaaaaatcttcatctacatgacatttcaataacaataagctttagatcacaaaaataagaagaaaactagaaaactgcaaacacctctaaatattcagctcaattctataatgctacagtgctgcttttgttcttcatttttaagttttccccctagagcaagggtgcctaatcttttgacttcccttggccacactggaaaaagaagaatggtcttacgccacacttgaaatacactaacactactgatagctgataagctttaaaaaaaaaaaagaaagaaactgcaaaaaaactcataatgttttaagaaagtttactaatttgtgttgcgctgcattcaaagccatcctgggccacatgtagcccagcccatggggcgtgggttgtacaaacttgccctagagcatatttttaattatttaaaaaattagggctgggagcagtggctcatgcctgtaatcccagcactttgggaggccaaggtgggcagatcacttgaggtcaggagttcgagaccaacctggccaacatggtgaaaccctgtctctaccaaaaacacaaaaattagccgggtatggtggcgggcatctgtaatcccagctacttgggaggctgaggcagaagaatcgcttgaacctgggaggcagaggctgcagtgagccaagattgcactactgcactccagcctaggcaacagagtgagcctccatctcaaaaatataaaaataaaaacaaaaatattacatgttaggtgcaatggctcacaactgtaatcccagcactttgggaggctgaggtgggaggatcacttgagcccaggagttcaaaccagcctgggcaacatagcaagactccatctccacaaaaagaaaaagaaatagaaatacacaatacatgtcctttgccaaaaaaattagtatatataagttaataatttaaaatttaaccctactccataagaagtaactccactattcacaattgggtgtggccttccagatttttttatacatatacaaatatgtccaggtcttcctgttctattattttttttaattgaatggactatttgaatgcacatattgtctgcataattgaatgcacatattgatctgcaagttgctttcacctaatatactgtaggcatctatgtctgtatttatggcatgacctcattgtttttagtggccaaataatatgtatttttttccctacaaaataatttattggaacacacagctacagcagacactctatgtacaagcacgttgacactcctgacctaccctcaactaggggacccttttcttcccccttgccttgcggacctcttctatcaaatctttcaggtactggatctccttggccagggaatctgccctctcttttagagcctcgttcttcttttccagctctttgcactcgccagtgagagcctcctgctccgccctcttcttctggcggtacctagtggctgctgtcttgttttgctccatttttttcagcttcttatccagtttctcaccctttacttttgctgctaccatcttctctccaggaggatcgtaaggtttggggtgggcagacccacagagaacacctggagatgggaggctcctatttggagagcccctggtagaggggctatgctgaggagaccccagataggactctgggctcatacagatgccactatcattatctgaaggggtgtcttcctcctttatgcactgagggatcatggcaacgtaagcagtggagtccggcttcctatcttcttcagtgatatccacttcactgcccagctctaaactaaaggaatgatctggagtggaggactggacccctggggaaaggggaagaagttgcaagaaggtgaagggggcaacctggtcgggttttgttaaactttctgggagatggccaattgggttcaccatctgggggggcaccttattagtctcctggactaggggggcaaagagattacaagtgtcatccaacgtggtcaaaaggtcatctggcatggtttccaggtcatctatacccaacagggcaccaaagtcgaactccttcaaatccattttctccaacatccaatgtgtcccagagaaggcatcctccttgctgttgttggagggactgaccaacccatccacagtcagccattcggaggagcccgccttagccttgtcgctggagaacccatgaggtttgaagtgcttggccacctccacgtagtcatctaagagacctatgctttcttcagcccccaaacccgactggtcgaagggggacatcaagtcccccaccaacacctcgttgctcaggaagctcatttcggtcatgttgcggtgctttgctggaatcgagtaatgtgcttaattcgaaggtgtctttgtcggttacagcaatgctgctgctgaatgccgtgggaagcgccatggcttaagccgctggggggtgccgctgcagagcctggtgctgctgccgccgctgcaaaggccaatgctgccgcaggcactgctgcccctaatatgccatggtggccgtggaccctgagggcggggaggagggaaggcgtgcacgtgcggaaaaaactacatctgtgggcaggcaaagtagaaatgccaaataatattaataacctctttttttgtttttttttttttttgagacgggagtctcactcttgtcgcctaggctggagtgcaatgaatgacacgatcttggctcactgcaacctctgcttcctgggttcaagagattctcctgcctcagcctcccaagtatctgggactacaggcacctgccaccacactcagctaatttttgtatttttagtagagacagggttttaccatgttggccaggctggtcttgaactcctgacctcaggtgatccgcccacctcagcttcccaaactgctgggattacaggcgtgagtcactgcgcctggcctataatctcttcagaggactgactctataacagcactgtactagcaagtactacacgggttattcttcacaaccctttgaagatgttgctattttcttttcattttatagaagaggaaactaatgcacagaggttaaataatctgtccaaggtcacacagatagtaagaggtagtggcccggcatggtggctcacgcctgtaatcccagcagtttgggaggccgaggtgggcggatcacctgaggtcgagagttggagaccagcctgaccaacatggagaaaccctgtctctaccaaaaatacaaaattagccgggcgtggtgatgcaggcctgtagtcccagctactcaggaggctcaggcaggagaatcgcttgaacccgggaggcagaggttgcggtgagccaagatcgccccattgcactccagcctgggcaacaagagcgaaactccatctcaaaaaaaatttaaaaaaagaggtagtgtcaggtccccaaatctagctatatttattccagaacctgtgctcttaaccattataatgtattcccattgaatgtccagatttaattaactgtttccctactgataaacattctctttacagtttatgttgcttcctgttttttacaaatggaattcatagatgtagactttgtggggtttttttctaaaaagaaataaaaaaaaccatttatggaatattccatttccccccactaatttaaattctattcttatgctaaatatacttagatctggactcttctattctggaccagtacaacacagactgaacaacggtagcttcacagcatttagagaaaggcacacatcaatgcgtctaaaacccttcccacattctcaagtcccaaccccaaccctgtacccttcttccttgtggtgctctcagaacccttatgcattacaatagtttcaacacctaacaacttccccatatttctacccatactttcttccagtctcaaggaggcattcctcctttccaaggttaacttcttcacctgagttctcattcccaactgcctctacctcacctgagaccacatctgtaaccatccttcttgtttaacacttgcgttcctctctctccactggcttcttacttacctcatcctacaagcatatactggtctccccaactcaaataacaaataccaaaaaagttccatctgccatgtcttactaaccagtcacttgggctgggcacagtggctcacacctgtaatcccagcactttgggaggctgaggcagatgaatcacctgaggtcaggagttcgagaccagcctggccaacatggtgaaaccccctctctactaaaatacaaacttagccgggcgtggtggtgggcgcctgtaatcccagctactcgggaggctgaggcaggcggagaatcacctgaacctgggaggcagaggttgcagtgagctgagactgcgccattggactccagcctgggcgacagagtgagactccatttcaaaataataataataatacaaaaaaaaaaattcactcacccacccactcacccatccatcgattcatcctgtcctttcacaccacacatccagtaattcctcaaatatttacaatagtttccacccctctactaaaactgttctctggaacaccaaccaaaccaagtcttgtctcacacttcatttacctctgcagaattcaacactcatttctgaggctctctttcctcaaaaccctggatagtttgtgtctcttctgcctctcacttgtttcacttttcaccatacagatggacatatcttaagggttcagccctctcctcttccttcacactttctctcttcttcacagaatcgaagcaaaggttttgacttacaagagagctggattttatcctgatgctgctgcctatcagctttgtgacccaggacaaattatttaaactttttgagctttggtttatttgtaaaatagagacaataatacttctttcaacagattattgttgagatcaagtaagatcacatgtgtatagaagctggctaagcccagtgggcaactgataaattttggcttctcccttcccatactcaactcccaaacctttgtctctgatcttcagcatttcagtccaaatcttcaatcacctgccatatcttttcatccagatagcccatctttgcctcaaactcaataaccttttcttctggaaggaggaggaatcaagggcactttatctgaagagctggcaccagaactcctcttagggaaggcactatctttttggaggatgcaccttaatgagctacttagaatggagagtggcacactaagggtacgtatgggtgcttctgttgctccttgatggaacctaaactgcttgtaatttgtttttcttctaagatataagagtgaagagtcaaaaaaagaaaaaaaggaaagataagaggaaggagacattaggacaaagaaaggctggggttggagaacttaaagagtcagtaaaactttaaagtactgtttagggtaaccatgcttatgactcctctggagttgtgtgcatttctataaggtacaccccaactcatcattccccacaaatcattagtaaaatccatattctgaatatatcatgtgaatggatttttttggagaaactgaagaatggactgatgtctcatctgcagtggggcaaagacagcaaactggatcatgggagtcaaaatgatcataatgtgagtcctttggcaatccacagaaacctttgagggggcattaaaatcctctattctgtggttttgggaaataagtgggtttctgtctaatttccccggatcttgaggcaaagtaaagcaaccagccgacatttaggactcacttcaaaagcagtttctgctccagaattccaatttctgtcaatggtatctcacttctctggtcacccaggctaaaaatgtcagtcatcaaagaaacaaaaacactgaacatgtgctctatgcaaagcatcctgagtcaagaccttagccttttccaagttcaattacaatgggttatcttctaagagtttcctaccaaatctctctgcttccagtctctcctcccaatcactcatatttcttaaaaggagatactgagccgggcatggtggctcacacctataatcccagcattttgggaggctgaggtgggtggatcacgaggtcaggagtttgagaccagcctgaccaacatggtgaaaccacatctctactaaaaatacaaaaattagccaggcatggtggcaggcacctgcaatcccagctactcgggaggctggggcaggagaatcgcttgaacccaggagacggaggttgcaatgagccaggatcacgctattgtactccagcctgggcgaaagaacaagactccatctaaaaaaaaaaaaaaaaaaaaaaagagagagagagagagagagaaagagaaagagagaaagagagagagagagacttttcttagattaaaagatttaatctttttttttttttcttttttaaagttagggtctcactctatcactcaggctagagtgcagtgaccagatcatagtccactgcagccttgacctcctgggctgaggcgatcctcttgtttgtgccttctgagtagctgggactacctctgcctcctgggttcaagtgattctcctgtctcagcctcccaagcagctgtgactacaggcaccggccac[131 bp omitted]caccgtgcccggcctcttgcacattttttaattgggtggtttgtctctataatattgagttgtaagagttcttaatattgatacacatcctttatgtgatttgcaaatattttctttcagaaagtggcttgtcttctcaactttttactgtcttttgaggcccaccaccatgcctggctaatttttaaaattttttgtagagatgagatctcaccacgttgactgggctggtctcaaactcctaacctcaggtgatcttctggccttggcctcccaaagtggaaggattgcttgagcccaggagtagaagatcagcctgggtaatatagtgagaccccatctccacttatttaaaaaagaaaaaaaaaagtctaccttcaatgccttttgctaccaagaaccccaccctttcaatcatcaagctcttgtctttattttatccaaaaggcacaaacccctctgtgctgttatttttaagagctttattgaagtataataaacatggcataaaattcatccattgaacaattcaatgattttggcaaccatcatcacaatccagctgaaaacatttccattaccccaaaatgttccatcatgcccatttacagttaattcctactcttattaccagccttaggcaaacactattctgctttctatctctataaatgtgcttcttctagccatttcatataaacaaactcatacgatatatagtcttgcatctagtttctttcccttagcataatgtttttgaagttaaatcatgttgtatagcatgtatcagtagtttatccctttaaattgttgaacatggccaggcgtgttgtctcatgcctgtaattcctgcactttgagaggccgaggctgaaggatggctcaagactaggagttcgagaccagccagggcaacgtagtgggaccccgtctttacaaaacataaatttaaaaaattagatgggagtggtggcatgtgcctgtagtcccagctacttgggaggctgaggctggaggagtgcctgagcccagtaggtcgacgctgcagggagctatgatcgcaccactgcactccagcctgagcacttagagcaagactctgtctctaaaaaaaaaaagcaaagaaacaaacaaaaaattaaattgctgagcagtgtttcattatatgactgtaccatgaaataaacaatggattttgtttatccattcaccagctgatgtacacttggattatttccagtttcttggctattatgagcaatgccgctatgaacatctgcatccatgtctttgagtgtacatatgttttcatttttttggacagattcataggagtggaactgctgaatcataaggcaaatttatgttccactgtttaagacactgtccaactttccaaagtggctgtactattttacatttcccataacacttcataaagattccaattcctctgcattctcaacatttgacactgtctgccttttctattttagttatcctaattctaataggtgtgaaatggtatctcattgcagttttaattatatttccctaatggctgctgatgttgagtatctttccatgtgttcatcagccattcctacatctttttcagtgaagtatctattgaaatctcgcatattttttttttttgagacacagtcttgctctgtcacccaggatggagtgcagtggcccagtctccgctcactgcaacctctgcctcctgggttcaagtgattctcctgtctcagcctcctgagtagctgtgactacaggtaccggccac[186 bp omitted]tgagttgtaagagttcttaatattgatacacatcctttatgtgatttgcaaatattttctttcagaaagtggcttgtcttttcaactttttactgtcttttgaggtggtaatgtttttaatttcgaagaaatccaatttattattattttttacttgtatggattttgcttttggtgtcacatctaagaactcttcgcccaatccaaatcaaataacatttttctcctatgtcttcttttaggggtttcattgtttttgcatttatgtctatgatccatttttatttttttattagtgacagggtctcaatctgtcacccaggctgaagcgcagtggcacaatcatagctcactgcagccttgaaatcctaggcaaagcaatccttctgcctcaacctgccgagtagctgatatcatgccaccatgcccaggtaatttttaaaaacaatttttgtagagacagggtctcactctgttgcccaggctgctcttgaactcctgggcttaagccatccttcagccttggcctcccaaagtgctgggattacaggcatgagtcaccatacccagccccattttgaaaatagctttgtggagatacaatttatataccacagaattcacctatttagtgtgtacaatccaatggtttttagtatattgaccgtgttatacaactattcaccactatctaattttagaacactgccattatcccaaaaagaaatccattagcagtcacagctcatttctccctctcctcagcctctggcagccgcaggcacagccactgcgccactgccactaatctactttctgtctctgtggatttgcctcttctgggcatttcttataaatgagattattcaatagatggccttttgcacctggcttatttcactgagtataacattttcaaggttcatccaggttgtagcacatatcaaatcttcattcctttttattgccaaataatattctattgtgcagacttaccatattttatttatcagtagttctattcatcggttgatgaacatttgggttatttccacattttagctattatgagtaattcatgtgcaagtttttatgtgaatgtattttcttcatttttcttgagcgtatacctaggagtagaactgctgagtcatctagtaactagccatctgagaaactgtcaaaccgttttccaaagtggctgccccattttacattcacaccggcagggtatgagggtttcgctctctccatatccttaccagtactcgtcattatcattttttaaaattatagccatcctagtgggtgtgaagtggtatctaattgtagttttgatttgtatttccttgaaagttaataatgatcatctcttcaagtgcttattgtccactgtatatcttttttggagaaatgtctattcaagtgctgtgaccatttttaattgggttgtctttttattattgagcatatgagttccttatatattctagatacaaattcttgtcatacctatgatttataaaaatttctcccattctctgagttctctcttttaactctataatccattttgagttaattttggtgatgtaaagaataggtctgagttcattttcttttttgctcatcccagcatcatttgttgaaaccactatcctttccccattcaattgtctcggtacttttgtcaaaatcaaccgaaaataaatgtaaggatttctggttcataactctgttccactgatctatatgctcttcattgtgccaataccacactatcttgattactgtggcattatagtaattatatgcatagtaacttttaaaatagggtagcgatagtcctccaactttgttcctttttcaaaattgttttggatattttaaagtgtcaaactgtgccaacca[137 bp omitted]tgcctc[222 bp omitted]tattaaattgatactcctaaagctaggagaaacttacattaaaacttttatagttattcgacaaagacttattatccatgcctttaaaaactgttcttgcaataggaaagacccatttgacaagaatatgtgtactctaaaataacaaaaatttggagaatgatgatgtagacagatgtgatacatctatggctgggtacggtagatcacttctgtaatcccactgctttgggaccccgaggtgggaggactgcttgagaccaggagttcaagaccagcctgggcaacacagtgagatactgtctctacaaaaactttaaacattagccaggcatggtggtatgtgcctgtaatcccagctactgaggaggctgaggcaggaagatcgcttgagcccaggactttgaggttacagtgagctttgataacaccactgcactccagcctggatgccagagtgagaccctgtctctaaaaataaattatttaattttttaaaatctacaatcagttgactttaagtaaaggagattatccttgattatgtgggtgggcctctagtcagttgaaggccttaaaagcaaaaacccgggtttaaccaagctagctggtcaggactctgattaccattctgaatttctgtagtaggtttacttcttaaagacttcagcaaaacaaattattcctattttccaacttgcccaagtatgtggagggaaacaaactagatttatgaggtactgctttatataaattaaactgtctttatattatgcctatttcttcctggatagagaaaacaggcttttatcaatgtggacttttatcaacgtggatacttctgtcaaaagatgagcttcataaaagcaaccatctccgcaaagccatacctttctttgctaaacaaatgatcttgggcttttaaagatgcaaagatcttagagaagcatgtatgacttctaactcaaaaattacaaaagtacatccaaatacagtagaaccgtgctctaaattgctttctatgctaatgtagaaatgctatacagaaactcccaccatactttctattacttaaatgattaatattcacacaattattaataaatctaaaaatcacctaatgcataacattattcattgttgcactgtttgcaatagtaagatactgaaaaaacaactcacagatgtttatcaacaggagactatgtaaaaaaaaagatggcatatgcatgcagaggaatactatatagttgttaaaaagcacaaagaaacttatcaaatatgagacaatataaaaagatctccaatatctctgaaagcaaacagagcaaggtgtagaacagtctaatagcatgctatgcttgcatttacacaagaaactctaaaagaattccaaagaaaccaaaagtggttacatgggatgggaggtttagagggaggaaggagaaccaggtggatggacaacagcggtgagaacaaggctttcactgtacacgttttcattcttttaaagtttgaaccgtgtgactatattacctattcaaaaataaataattctaaataatttaggctatttatttctatctacctctatttaaggatagaaaaaagctacaaacccaagtctcaacttgaaatctgccattcttgataggatttaaatgtttgtttcaatgtgcatacaaaactaagaagttccattaaatatactaagaaaaaagcaatttcagctggacactgtgaccgtcattacaaggacagatgatggtgcttctttccgaaacaactgttccaccggcagtgcaggtctagccgctttccagcgagccagatagtggtctcaacttaacactcaaactacaaggtatgtcatctggagaaagctgactctgccacttgctttgttccactgttagtactcaggataaggagacttctcaaaatcaacccaggttgattcctctatagggacttcaattatgacacgaaatagccttcattccataatcatggaatgattgttttaagtcttgttttttgagtacaagttcaaaacccaattccttgagaggtggaggcagacagtatagtaggaagaacactaactggctgagagaccctggccataccaattcatttctctgggtctccattttcttatcagtgaaatgaatgggaggccaaggcgggaggattgcttgagaccacgagttcaagaccagcctgggcaacatagtgagagagtgtctctacaaaaaacttgcctgggcgtggtagctcacacccgtaatcccagcactttgggaggccgaggcaggcggatcacctgagaggtcaggagttcaagacttgcctggccaatatggtgaaaccccatctccactaaaaatacaaacaattagccgggtgtggtggcaaacacctgtaatcccagctacttgggagactgaggcgggagaattgcttgaaccctagaggcagaggttgcagtaagccaatattgcaccacttcattccagcctgggcgtgacagagagagacgatgactcaaaaaaaaaaaaaaaaaattaaacattagctaggcatggtggtcatggccaaactctgtcaacggttcctttcaggactaatactgtaatcccataaagagccaggtcaattcaaagatcagaagaaaggcgatgcctccgtctagagcatatatgcaagctcacataaggtttcaaatacacaaaggtttgctgacagagacaggatgttctgattctattttctatgttttagcttcaacagaaataatgtggtccacttgctataaagacttctctcatgtataacttctgatttaacatgaattacagttttacagttaaacttttaaaactggtagagaggagaggattatttattgagtgtgctaattaacaaaagttttggtttggtctattgtctttttattatcatcacccaagattcatacttgtacaaatatgctttggggaacagccttccagaggtttacctatgttaagtcccacatatgaaagagcggtgaatactttcctgaggcagcaaacactattgaaaattccaagctcagcaaagtatgctccatattttgatcaataaaagccatgtggtttaagaaaaacagagcccacaaatactgctgcatatttttgtctattttaaaaagttttcctcatgccgccctaagaatatttttgtctattaaaaaacaaaatctatgccttggttagcgttgattttatgtagtcataatcagtcagagctttattaaaatactaacgacccacagctttatcttagacctttctaaaacaattcttcaccatattcatctttgcaaggattcattctttggtacaaaagcagtgagaaacacagctctggcagacactctgcagggatgcgggcaggttcatcgtctggcccctgctttcacctggcagacactggacacactgctgagaaaccagctcatctcagtatgtctctattctaccaaaaagagacgaggctctgctccaattctgacacctcattccgaaatcaccaaaatctccatcgggtcctaagcagacagaatgtcgcagccattcatcctcagaagtcttgagaataaaattaaaagtaattaattaaaataaaactacttgcaattaaaagtaaacaccggctaggtcatgcaattcatactggccggtgctcacataactgaactaccttgtgattctctgctttgctgtcaaaatcctcctccacctccaatgctgataccacaatccagaggctagagacatttaagtgaagggatgattctaataacaaacatacttctatacgtttccaatacctctgccctgtcccagagctggtcccactccaaaacccaggcttgccactacgctagcaaaggggcaatccgagtaactctgatactcagattcccaaacatttctgttactttccaccaccaccaccccccccaccccccggcttctgacagcctctgcaaaagcaccagcactgcaaatgcctgtttggcttccatccttcagcaggcaatggaagcttttccaggagaaacctaattctaacctttccagaggccaggagacggcagcgcagggatagcacctggcgcaagtgcctgtttggatgccgaggtcgcctccctcgcggccctcggaccccgcgaggcaggtaggctttgggccgggccggccgggtccgtgcggggcgccgacctcgcctacgacgccgcagccccgctccccaggagcctcggtccctgcgggcacgcgtccccgtcacggggccgattacaatggaggccgctcccgtcctcccgtggaggggctcggtgccctcggtgaccctgctagacccggcaggacgccccttgggctaattcgcccggggcgggggagacctcggccttctcgaagacctcccgcgctcgaagaccgtttcggagcgtccgcaaccactgagtccccgaagacccgcggggccccctcaggccgtcccgacccagacccctgcccctgcccctctccctcctcgcggctgcggcgcccgcccgccctcaccggacttgggcgggtagcggtacacggaattagacgggatgtccacctcctccacgcccgcgtgctgccggctcgtcagggcccccatggccgctgcggctgcagccccggcccggccccggtgcccgcgccgccctccgcgcttcaccgcggccgcccgccccgcgcccggtgcgggggccgactgcccgccgcggccggctccgctgcggcgctgcggctctggcggcggggagcccccggcgcgccgcgcaccatcctccgccgggcaccgcggcggcgcctctgccaagggggctgcgggtctgggccgggggcgccgccgccgcctcaggccgcgtgatgtcagcggccgctccgcgcggggaccgcggcggccccagccaatggcgaggcggggcgggagcgcccgcgccggagcagccaatgagcgcgggactgcagcaggagccggcggcgcgtgcctcgcgcggggagccgcggctggactcggcgcgcgtggacgcggcccagggcctcgcggcgggggcgtgggcgtgggcggggactcgcgacggggacgggggcgcggccgggtgcccgcggcggggcggggcgggaccggccggagctgggaccccaggagacgagcgctgcacccggccgggacgcgtcgcccctccgcgcctgtttatcccggctcggattaccgcgcagggagccgccccctcccgcggtccgcgaggactggccgggagctcgctcgccattgtcctgggcgtcccaaagcgggcggtccccgctccgctgctcccgcgcctggaggaagccttcccaaccccgcccctcagcgtcggccggcggaggtcttcggaaatctcatgcaggggggtagggagaggggtcccacggtgcattcgcatgtctcctgccccgtgttaatgctggtgaccggctaggaagatgccgcctccctctcacgtgcgtctattcaaagcgctcccaactctatacatgctgtttaaggctccttgtagccctaaagttaggagaacatcgactgaggataagatcaagacatccagcctctgtctgtatcgtggaaacgggaccccggaaactttggaaaggcctgagtgccaagagagtcaacgcaggcgaaagcgaaccgggccaggcagaaccgggagctcctgttgataaaaacacacacaacagtgggaagcttgggccggcggaagacgtcattccattgcttaattacagacatttgtgttttaaaccttctattttctttgtgggtctggtgttttttttcctgagagagtggactgatcagcaaacatttcaactgctagaacatgactttcacaacttttcaacagtgttcgaagtacagtttggggtgtctggttcccttgattaggtttgtaaagctattttacggagtctaggtctttcctggttatattttgtttttgtttttctgtgttttgagacggagtctccctctgtcgcccaggctggagtgcagtggcgtgatctcagctcactgcaacctccgcctcctgggttcaagggattctcctgcctcagcctcccgagtagctgagactacgggcatgtgccaccacacccggctaatttttctacttttagtagagatggggtttcaccatgctggccagactggtctccaattcctgacctccgccccccaaagcgctgggattacaggcgtgagccaccgcgcccggcacatttcgtatttttcattgccgtcttttcagcagcagccaacagacctgatgctaagtgccttggtttcctccagggtcctcaggatggtgggaacacatccctgtcatttatattggctgctgctaacgaaggcttgggttacagggcaagtccctgccccggcagcttctcccaagcaccagagctctctggcagagtccctggtcctaactactccagggctttcagtcatccctgtgggagggaactggtgtcctcctccatactcctttcagcacacacaggccctaccttgtaactgctgggtaaaggtaaaatgcaaataagaatctagaaccacctcaaaacacaaggccttcgacacatcacagagtaaaatgttgccttatgctcctcggctctgttcagaagccttggttcttcctgccctcggcattttgtaaacgggacatcccttccctttgtgggtttatccatgtctgagagtttcttctgcttagccagggccaggcagggatgtggcttagtcaagcagcccagtcctgttgcttatggggtgtctcttctggtcccaccttggcctgaccctgggaagccagcttctccatcttgaataatactccccaagcctagaagttggttcctcctcccacgaaggagtcatgagtccaatgcttagaatagtaaagaaaaacaaggcatagcacaataaaattagtggatatttatggaacactctatgtgccaggctgttttaaacacttcacacgtattaaagcattcaaccctcccaacaaccctatcaaatacatgctatttacaccccgattttacagtcgaagagaatgaggcacagaaagagcactagactttgagttggacaaatcaaacccctaagcagctatgtaactttgacttaagcccttagaaacggtctccgtttcctcctctgaaaatagcccagtctccaatggttattgcaaagatgcaataagtgaatcaagactcttttgttttgttttgtttttgagacagagcctcactctgctgcctaggttggagtgcaatggtgtgatctcggctcactgcaacctccaccttccgggttcaagtgattctcctgcctcagcgtcctgagtaactgggactacaggcgcccgccaccacgcccggctaacttttgtatttttagtagagatggagtttcaccatgttgtccaggctggtctccaactcctgaccacaggtgatccgctcgccttggtctcccaaagtggtgggattaaaggcgtgagccaccacacccagccaagactcatttttaaaagaatgttgaccagagacagaagagaaacggatagaaggcagtttagaaacttctagatcaaagagactttttgtgaattgagctacagtcccacagtctacagtgtaatcacctagtgtgaacaattttggaaatagaatctcagccagtgccctgggcaaaggcgagataagcagctagaccctcggagcagccgactctagaggggctgagtcctgcattcctctatggttcttccctggctccacttggctccctcgccaaagatctgggccagggagagtgcccgagggagaaggcagctcagataggaggaaaaatccagaagtgactgcaccaagagagccataaaaatgtttttaacttgaaaaatggtctggggaggggttgcacagtgtgcatagggaaatcacatgcaaataccacacgtgctttgtggaaatagccttgtagcaccctatccatttccacactatggatgcagcccttgggagaatcccagcagacaacacaacatccaagggtctcagcggttttctctaaacatccctggaaggcaaggggcaaagccaggtatttctatcacattgaagctcttcttctgcaacttgggtctaagggagaaaggagaagggtgggggaagtacggggacaagtaatttttaggtgagcttgtccctttggacttttcattttgttcatgttgctgtcctggtttcagcccagatgtgccatttccacccttgtaacacatgcaatgattagcttagtgcaggaaggagtgagggagcctgcaggtggaaactgacagacacagccctgcagcacagcattcctgaggcagcagggtttgggaggcaaaccagtatctcaggtgacctgaaagagctaagaaaggtctctgattttgggacaggaagatgagaatcttggctgttcttaatgagtaccagctctctccagaagatagggcccaatcagccacacatgggcccgatccctcttttagtcctcgacatgtggcttcggtggattgaagccaaaaccaccagcggagaatgtcacatcctgctccagatcagtgggctaggctaacgtcgacagaatagtctgatcctaaatgctttggggccctgcagatggttcctctggcaacctaaggctctctgtagaggaaaataatcttgtccattaggaaatccgcaatcaggctttcatattttgctttttgctgagtgtgaattcctcattgttaatttcgtcctccactctgggctgccaataaagaagagttgttcaaatggatgcagactccagtccagtttgtagcctattaatctatttttcaagttaagactaaaatgaaagatgatgtttacacggcccaatgtgttggggataaggcgaagtgagtggggcacccagaatgtcaactttaagttctcattctcagccacgcacagtggctcacacctgtaatcccagcactttgggaggccaagatgggcggatcacgaggtcaagagatcgagaccatcctggccaaccccatctttactaaaaatacaaaaattagctgggcatggtggcacgcacctgtagtcccagctactcgggaggctgagccaggagaatcgcttgaacccgggaggcggagtttgcactgagctgatatcaggccactgcactccagcctggcaacagagcaggacaccatctcaaaaaaaagaacagttcttactctcagtgtcatgcaattgcctcacctgcctcactctggttccagccctgctgcccaggcatctggcattggagaaatgaggggcccaagactctatttatgtttacagactagtttgaagaaattgggagagtctgttctattttttgttgtttctatcaaataccagaccttgtaagcttggttctacctgttcacttctgccttcattctcttccttgttggtcctgctcttcttttggctttgagctcactccacctgggactacacattc[136 bp omitted]gaaaccccgtttctactaaaaatacaaaaattagccaggcgtggtggcacacgcctgtaatcccagctactcgggaggctgaggcaggagaatcgcttgaaccagtgaagcggaggttgaagcgagtccagattgcgccactgcactccagcctggggccacagaaggagactgcgtctcaaaaaaaaaaaaaaaaaaagtgtgaggctaacatttcagcttggcagggcaggcctggtagctcacacctgtaatcccagtgctttgggaggctgaggtgggaggattgcctgagcccaggagttcagcaccagcctgggcaacatagtgagatcctatctctacaaaaaaaatatttaaaaattagctgtgcaggccaggcgcggtggctcatgcctgcaatcccagcactgggaggctgacgcgggtggatcacgaggtcagtagctcaagaccagcctgcccaacatggtgaaaccctgtctctactacaaatacaaaaattagccaggcgtgatggcgcgcgcctgtaatcccagctactcaggaggctgaggcaaaagaattgcttgaacccgggaggtggaggttgcagtgagcagagatggcgccactgcactccagcctgggtgacagagcaagaccctgtctcgaaaaaaggaaaaaaaagaacatttcagcccagcatcgactccagctgcccttcttggagaaacagaccagaccaaataggcacaaagcccagcgtctgcctcttgctacctagaaaaggtagaatgtggaagcggcagcgtggtgacagccccaaacctttctttaacaaaacaaatactcacctgcggttacttagatcaaaagaagaaaataacaaacagggtttcttgaaaatgcctgtcctggctagatggtcagatttggaaggaatctcaaaggtacagcccctcccctgacagatgaggcagctgcaacctctacagggtaaggggcttgcccaagaccatacaagtggtagccatagctcagaacccagggatccctggctccctgtgcactgggtcttgatatgggaagctggtgctatgctggttttatctctctctgtctctccttggtgagccatctcctacagctgtcataagaggacaagccgacttgaggttgagctctgaagctcaacacaagtgcacacacgtgttcagctgttgcaatatcagtgtgagcatgcaatcaactgcactcacaggaaagttgtctgtaactgtgctcaagtcagaatcagaaaaccactgagctcctctcagctggagactccctgcaccctccctctgctcttctgaaactggagctgaggtcagggctgcagaactgaactgatcaaccagtcacctaactcctcccaggcacaggaaccaaagggctgctgagaaaagagaaatgagaggccactgagggttaggagatcagattcttagcaagtaggttaaaagtgccgtatgcatgctaatagtgtgtccagctaaagtctgagtgccagccaaagtccactacagacaagcaatttgtttacaatgacacatttatttctgagcaaattgcttgtttatttatgtgataactactatcctattagggtatttcaaagactgtgtgttgatcctgacaaagtaataaacagaaataccactcactgttatggttctcacagtaagctattggaagccttaggtcttttttacgcaccatgaggtatatatttattacattgttagccgtatcctgttatctttttttttttttttaagatggagtctctctgtcacccaggctagagtgcactggcctgatctcggctcactgcaacctccacctcccaggttcaagcgattctcctgcctcagcctcctgagtagctgggactacaggcgcacgccaccatgcccagctaatttctgtatttttagcagagacgaggtttcaccatgttagcggggctggtcttgaactcctgacctcaagtgatccacctgcctcggcctcccaatgtgcttggattacaggcgtgagccaccacgcctggccctgttatcttttattttattattattttttataataataatatataataaatatctttgtttataaagatataaatataataaatataataaacatatttattttttgttgttgttgttgttgagacagagtctcattctgtcgcccaggctggagtaaagtggcacgatcttggttcactgcaacctccgcctccctgattcaagagatactcatgcctcagcct[134 bp omitted]cggcctcccgaagtgctgggattacatgagtgagccactgtgcctggcccctgttatcttttatattccaagatgaaatctgtgtatgaaaagaggtctggtaatttcattagcttcctctctggttttcctattttcctacctcttggtcttccttccccttatccattctctaaattattctcaggttagcgtcaccaatatacagctgtcatcatgttactcccttatctatatactttcagtggctccctgttaccttacagaagacaggtgcttcatccctgagccctttcctctctctgcttcccaataaacacctgctcataccccaaatgcagcttatcattcctgctcatgtatgagttttttgtttttgttttgttttgagacaaggtcttgctctgtcacccaggctggagtgcagtgatgcaatcacggctcactgcagcctccacctctcgggatcaagcgatcctcccacttcagcctaccgagtagttggaactaccagcatacagaaccactcccagctaatttttgtatttttggtagacacaaaaccccttttatagaaggagtttcgccatgttgcccaggctggtctcaaactcctgggctcaagcgatccacctaccttagcctcccaaagtgctggaattacaggcgtgaaccactgcgtgtggctcccgctcatgtttttgctcacaaaaaaacccttccacttgtgccctttccattcctgtctgccaaggtgaattccactcagctgaaatcctgcctcttccatgaagccgcctctgagaactgctgccaataggtggctcttctttctcagaagttctattgcatgaattattttcagtataacttgatatttatgtgcaagatgccctcagtctacaaaggcaaaagacatatacagttgtccctctgtatctatgggggattggcgctagataccaaaatccttggatgctcaagtccctgatatgaaatggcacagtatttgcatacaacctactatgcacaatgtcgggtaggctttaaatcatctctagattacttataataccaaatacaattcaaatagttgtattaccttttattgtattatttttcattgtttcttttctaatttttttttttttttaaacagagtctcgctctgtcaaccagtctggaatgcagtgtcacaatctcggctcactgcaacctctgcctcctgggttcaagcgattctcctgcctcagcctcccgactagctgagattatagacatgcgccatcacgcctggctagtttttgtatttttggtagagatggggtttcaccatgttggccagactggtctcaaactcctgacctcaggtgatctgcccaccttggcctcccagagtgctgggattacagatatgagccactgcgctcagcctcttttctaatgtttttgatccatggttgattggatccatggatatggaactcagggacttgaaggatcaacttcataaagctctagagtcaaacagagcaaagttcaaaatccaggtcttccattattggctgtgtatctgggaaagttctttgacttctctgagttcatttatgcttcatccatgagaacatctaagagctctttgaacattaagttagccaaagcatgtgcagccctcacacagttcctgacatacagcgggtgctcaatgaatgctaacttttttaattaaaaaaaaaaaaaagctggctgggcatgatggctcatgcctgtaatcccagcactttgggaggcagaggcaggcggatcacttgaggccaggagttcaagaccagcctggccaacatggtgaaaccgcttctctactaaaaatacaaaaattagctgcatgtggtggtgggtgcctgtaatcccagctacttgagaggctgaggcaggagaattgcatgaacccgggaggcagaggttgcagtgacccgagatcgcaccactgcactccagcctgggtgacagagcgagactccatctcaaaagcaaaaacaaagcaaaaaaaatccctt[182 bp omitted]ggtgtggtggcgggcacctgtagtcccagctacttgggaggctgaggcaggagaatggtgtgaacccaggaggcagagcttgcagtgagccgagattgagccactgcactccagcctgggtgacagtgagagactccgtctcaaataataataataataataattttaaagtcagagtttctggatttccaagtcaggatatgtatttgagagtctgcccaagatgaaaccgaggtccacgcacttcccataccaggtgaaggcagagcccaggggtttcgatttcctgagacatcacttttctgtgttcattgaaactcaaaatgccagaaacatgtctcccttatcacgtgtggtggctgctaaagggccagagaaaaagatagcccagccctgctccttcttaacaaagtactgccaacaagtcactgcactagaagaaagcaaggcccctaatcggccctcttgcccctgctgtctggattagccatctgtggacgtgtgtggtgtgtgtatttgcggatgtgtgtatttgtgggtcagagtttgtctgccattgttttggggggtttgctttttgttttgagatacggtcaccaggctggaatacagtggcatgaacgtggcccacagcagcctcgacctcctgtgctcaggcgatcctcccacctcagcctcctgaggagctgggactaaagtgcgccaccacacccggctattttttttaagagatagggtctcactatgttgcccaggttggtctcgaactcctgggctcaggtgatcctcccgcctcagcctcccaaagtgctggaattataggcgtgagccaccgtgcacggccttctgccattgttaacttctcacttaagtgccatttgctaactagaaagaatgttcaagttcactgagttggggccagctctccagggctcatagttcaggaattttgccagccagttgttaaattgttggtagcgtaatgggagtatttacaacacagaaaccatcaaatgctgcaaatcacagcttcctcccattctccagagccagtttaccagcatacccctggtcttaggtttcttctaatcccccagaagggctgggtacattgcttcccatatagaaagtgctcactaaatgaatgactatttagttgttgttgttgttgttgttttgagacggagtctccctctgtagcccaggctgatgtgcaatggcgcaatcttgactcactgcaacctctgcctcccaggttcaagtgattctcctgcctcagcctcccgaatagctgggattacaggtgaatgccaccatgcccagctaatttttgtatttttagtagagatagggtttcaccatgctggtaaggctggtcttgaactcctgacctcaggtgatccacctgccttggcctcccaaagtgctgggattataggcgtgaaccaccgagcccagccaagaatagtcatttttgagcaatgactctgtccaagcactttggaatgcgttgtcacccgagctggagtgcagtggtgtgatcacagttcactgcagtctcaacctcctgggctcaagcgatcctcccacctgagcctcatttaatcttcaaaacaaccctaagagataagtattattgttcccacttcccagatgaggaaactggaactcaagtaggcacagggagcaggaactggccccaggttcttccaggttcaaagtcctacattttacccatggatcatcatctcaccagcctctgtggggaaagcctgcctgggtgccagccctactgcccaccaagctagcggagtgattctcccagggtggtgccagtgacaaagggcaatgcatggggacgtctccatcattgtcacaccaccacctccaccttcactgtgcctctctctaggtttaatctttcttccttttcctcctcacttccctctgtattatcaatctccttcctgtatcgggactatttcctcaacaggcccggggaagctcttgtctatggaagtcctctttggccttaagcttccctctaagagctccagcagatgagtaacctgtcctcctgcaaacactgccatgaagtgcgtaggcagctgcctgccttcagggctggatggacaccctgtttccttgctcaatcccttctgatgactggactctgtacacagtgtggtcagtgggtcagctctgatctggaagctcccaaaggcaggacacaagattttctctgactgttcccaggccccagggcgtgttgggcacgggagcgtgtggcacggatgttgttcgtgatgaggcatattctagtggtttcccaattcggttgtgtacaacccagtgctctagtgttcagtaaatacttccttcctctttaggcagaacactggctctgtgttttattaacagcacctcatgcctggcccaaagaatgatttgtgtggcttgggctgttggggtcagaaatggcattcattcatcattcactctggaggtgctgtgtttctgaaggagaaggggacctatcctggcaaacaaatcaggggctttatggtaaacaaactcctctcttcccagcacttgtttcttgctctctgtttttgattttctctctctttcacttttttttttttttcactatacccgggcttcctgagttcctgacaatttctaaagcctcaagcatgatctcatcagaaactctggcttcttttaacatttctttcccttctgctgagtcctagtccatttaaatttcctctgtgactctgggaattttttttccttgagacacagtctcgctcttgttgcccaggctggaagtgcaatgggctgatctcagctcactgcaatctctgcctcccaagttaaagcgattctcctgcctcagtctcccaagtagctgggactacaggcatgcaccaccatgcccggctgattttgtatttttaacagagacggggtttcaccatattggtcagactgacctcaaactcctgacctcaaatgatccgcccacctcggcctcccaaagtgctgagattacaggcgtgagccaccgcgcccagccggactctgggatttaaagataaccaagtgaaaataggttcatcctctttgactcacagcctggctgcctgtggaggcaatgaggagctgacattcacctgacccccgtcctctactttcgggtatgcagaggctctcttttgctgcccgcgtcaagttagaagaggccacatgattcttcgggacagtgaaccatgaacaaaggtgtactgcagtcatgtgttgcttaaagacccgtatacgctccgagaaatgcgtcattaggcgattctgtcgtcgtgtgaacattctagagtgtactcacacacacctaaatgggctagcctaccacacacctaggccatgtggcatagccattgctcccaggctacaaacctatccagcatgttactatactaaatactgtagggaattgtagcacagtggtgaagtatttgtccatctaaacatagaaaagcactttgggaggccaaggcgggcagatgacttgaggtcaggaatttgagaccagcctggctaacatggtgaaaccctatctctactaaaaatacaaaaattagccaggcatggtggcaggtgcctgtaatcccagctactcaagaggctgaggcaggagaatcgcttgaacccgggaggcggaggttgcagtgagccgagatcaggccattgcactctagcctgagggacagaataagactccgtctcaaaaaaaataaaaaataaataaataaacatagaaaagatacagtagaaatacagcattctaattgagtgggcccaccttcacagacgcaacccatcattgacagaaaggtcgttatgcagcgtgtgctgtgctcccaggctaagcgtttcattgccgatgctcagctcttcagtcctctcattgtctgctggcatgttccatatggtgcaaagtgccagagaggacatcgttatggcttatggcttgtatattgcagctactcaaataaaaaaaattattaatttgggagataaactgggagatcaaggttccaaaggaggagaggttcgccccagggtcacatacaaggggagcagtggagaaactgcatgggctgtgaagggggctgtattgaggatttcaccagtggctgggaaacggtgagctaggagacgtcgacgtcttcagaggaggatcaggacttgggggaatttgtgggttccctggcagcctcacagtggttgtcagacccttccctctttggaatgtgccatcacaaggcattacatgcaataggtgtaatgacggtgcactagcaggcacacagtagggagactgacctaatgcacagtaggtagacattagtgcattaacacacacacatagtaggactgactgtcagcatactagcaggcacacacaatagctggcaggccttgaccacggacagagtatttttctctacactgtggaagaatatctgaggtcctcttgagaagcgtgaactacattcagctaattttttatatttcgtagaaatgggttcttgcttttttgcccaggctggtcttgaactcctgggctcaagcgatccacccgcccactcgcctcagcctcccacagtgctgggactatgggtgtgagccaccgtgcccagctctgcattttattttttgagaaaaaacaatcatacacccaaagtgtgtttataatttacatgcacaattaaaaaaaaaaagacagaggccaggtacggtggctcacacctgtaatctcagcactttggcaggctgaggcaggtggaccacctgaggtctggagttcgagaccagcctgatcaacatggtgaaacactgtccctactaaaaatacaaaaattagttgggcacagtggctaatgcctgtaatcccagctacttgggaggcagaggcaggagaatcacgtgaacccgggaggtggagattgtagtgagccgagattgcaccattgcactccagcatgggcaacaacagctaaactccgtctcagaaaaaaacaaaacaaaacaggatctcgctctgtcacccaagttggagtgctgtggagatctcggctcactgcagcctcgtgcctctcaggttcaagcaattctcatgcctcagcctcccgagtagctggaattacaggcgcatgccaccacacctaatttttgtatttttagtagagacggggttttgccatgttggctaagctggaatatacacaatttaaagaataataaacaatcacctgtgtccccgacacagaatttaagaagtccaagacctttgaagactcttgaatgacctctcccagatgcatatcctcctttcttcaccagagactcagtatcctccaatttgcattaatcggtcccttgcttttcattgtcatttaatcctatacatgtgtatccctgagcaatgcattgtgggttggcacattgattccactgcatatgtgacccagtccctctccctaacttctggtgggtgagctcagtggagttctcttaccaaggtagattcctccaagcaagggctggccctttttccgttttctgtgacctcagacagcgactctgacccaaacgagcaaccacaggtcataaggagataatccaagaaggctccttagagcagggaaaattgaacctgggaaggatttggataaacaggaaggggaagaaagggaatttttggaagagagaacagtgcaaaccaaagcaagttcatagccacacacattcagggcatctgttgggagcctgtgggggtgctaagtttggacaggcaatggctggaatgaacgtgctctgggcagtgaaggagacggggtggggggcatacatccttcatccatgaaaagcggcacatgctgtcaggttggcccagagatgcctcagattcatcaggtaaggctcagccataccgaggtaacagacagttttccttctcacccatacaaaggcggctgcagtgactcaagaaaatctccccttggggcagtaatatcatgacccatatggggaatcttccctcctctctcccagctgtgagttgacaaactgtagccgtgaagctgctgccagtttttgtaaataaagttttgctgaaaattagccaggcatgctggtgctcccctgtggtcccaggtactcaggaagctgaggcaggaggatggcttgagcctgggaggtccaggctgcagtgaggtaagaaggagccactggactccagcctgggtgattgagaccctgtctcaaaaaaaattttttttattggaacacagctatagaaattttttttttttttttgagactgagtcatgctctgtagtccaggctagagtgcaatggcgctatctcggctcactgcaatctccgtctcgcaggctcaagcaattctcgtgcctcagcctcccaagtatctgagattacaggtgcccgcccccacgcctggctaattttaagtagatacagggtttcaccatgttagccacgctggtctcaaactcctaaccatagtgtgtccggaattggtgggttcttggtctcactgacttaaaagaatgaagccgccaacgttacagctcttaacgtggcgcgtctggagtttgttccttctgacgttcagatgtgttcagagtttctcccttctggtgggttcgtggtctcgctggctcaggagtgaaactgcagaactttgctgtgagtgttacagcccttaaggtggtgcatagcactagcaagatttattgcaaagaacaaagcttccacagtgtagaagaggatcagaccaggttgccactgctagctccggcagcctgcttttattctcttatctggccccacccacatcctgttgattggtagagcccagtggtctgttttgacagggcactgattggtgcgtttacaatccctgagctacacacaaaggttctccacgtccccaccagattagctagatacagagcgtctacacaaaggttctctaaggccccaccagagtagctagatacagagtgccgattggtgcattcacaaaccctgagctagacacagggtgctgattggtgtgtttacaaaccttgagctagatacagagtgccgattggtgtatttagaatccctgagctagacataaaggttctccaaggccccaccagagtagctagatacagagtgtcgattggtgcattcacaaaccctgagctagacacagggtgctgattggtgtgtttacaaaccttgagctagatacagagtgccgattggtgtatttagaatccctgagctagacataaaggttctccaaggccccaccagagtagctagatacagagtgtcgattggtgcattcacaaaccctgagctagacaggatgctgattggtgtatttacaatccctgagctggacataaaggttctccacgtccccaccagactcaggagcccagctagcttcacccagtggatcccgcactggggctgcaggtggagctgcctgccagtcccgcgccgtgtgcccgcactcctcagcccttgggtggtcgatgggactgggggctgtggagcagggggcggcgctcatcggggaggctggggctgcacaggagcccacggagggggtgggaggctcaggcatggcgggctgcaggtcgcgagccctgccccgcgggaaggcagctaaggcccggcgagaaattgagcgcagagccggtgggctggcactgctgggggacccagtacaccctccgcagccgctggcccgggtgctaagcccctcattgccccgggccggcagggcaatgagccctgccattggtgcggagcccgccaagcccacgcccacccagaactccagctggcctgcaagcgccgcgcgcagccccggttcccgctcgcgcctctccctccacgcctccctgcaagctgagggagccggctccggccttggccagcccagaaaggggctcccacagtgcagcggtgggctgaaggactcctcaagtgccgccaaagtgggagcccaggcagaggaggcgcggagagcgtgcgagggctgtgaggactgccagcacgctgtcacctctcaataggtgatctgcccacctcagcctcccaaagtgctgggattataggcatgagctacggcactcggccacaaattaaaattttttattttgtagtacagacagggtcccactatgttgtccaagctggtattgaactcctgggctcaagtgatctgtccacctcggcctgaataaaatgattatactgccatttcttgatttatcaattttagaaattatttattttcaattacagtagatcaatatttacatacttaaaactgctacctctacatctgcttcccacccaccatcctgcagggcgcacccacggagatggggctgagacctggcctgggcagctgggggcctcttggggcactggtacatgttcgtagtcccagctgcccaggaagctagggcagaaggatcacttaacccgggaggtcgaggctgcagtgagctgcattgcaccactgcactgcagctggaatgacattgagacactcttaaaaaaaaaaaaaagggcgggccaggtgggaaagctgccttgtatctgaagtcagtgcctgccacaacaataggcctcttgtgttttggacatgaagctatagtggcctagctccaggcccatccatttctgtcctccccagagaaagtggctgggagtcctgagtctgagcagataactaaggacccctgagaaggaggaccctccttagaaagcttttacttcttgtcttttccttagcagagaggcaacctcctgtgtccagccaagtgtctctttgaaaagattgccagcgctgggcatggtggctcatgcctgtaatcccagcacgttggaaggccaaggtgggcaaatcacctaaggtcaggagttagagaccagcctggccaacatggtgaaaccctgtctctactaaaaatacaaaaattagccaggcgtggtggtgggcgcctgtaatcccagctactgaggaggctgaggcaggagaatcgcttgaatccaggaggcagagcttgcagtgagccgagatcgcaccactgcattccagcctgggtgacagagcaagtgtctcaaaaaaagaaaaaaaaaaaaaaaaaagaaagattgccagggactcacctaccattagacacacctagcaagcagaggcagggccaccttatcactgggttggcaggtacaggacagaaagtactcaccagtcagagtgctgcttttaggaaatgccattaactgtgctgggagtggtgcggcctttgtcccttgtgggacatgtgacaattggtgaaaaatgtaatctggcataagccagcaatgaattcatcactggggaattggctttcaccatcctgctgcttccaacagcacagataagcttttgtatcttttcagtatcattgagggagagctaagggggactccagggggcggacagggcttacaaagtcgaatgtgatcattaagagagccagctctggaagcaaacaccaagtatctgggctcaaatctcagctccctgagctagcgagtgatgttgggcaaatcacttagcgaccctgacctccttcattttcccttttattaactggggatatgcagagtcccacctaattgggtagttgtgagtattaaatgatgtaacccaggccaggcatagtggctcacacctgtaatcctaccacttgaggaggccgaggcaggtggactacttgagcccaggagtttaagaccagtgtgggcaacatagcaagaccttgtctcaaaaaagaaaaaaaattattaaacgatgtaaaatccaaatatagcacagagctgggctcttagtgtgttcccaatagacagagctcttctcatcacccaggaagactgggatatgcctggagtagaagcagcccttctgctcagtttccttcctctttgaggcaaaagaatagacacacacacacaaaaaatggctaggcgcagtggctcatgcctgtaaacccagcactttgtaaggtcaaggtgagaggatcgcttgaggccaggagttcaagaccagcctgggcaaaaaaaataaaaataaaaatcagccagttgtagtgttgtgtgcttgtagtcctagcttcttagggggctgggctggaggattgcttgagcccaggggagttgagggttgctgcagtgagctactacactctagcctgtgcaacagagcaagaccgtgtctcaaaaaaaacaaacaaactggctgggcatggtggctcatacctgtaatcccagcactttcagaagccgaggcggtcagatcgcttgaggcaggtagttcgagaccagcctggaaaacatggcaaaaccttgtctctactgaaaatacaaaaattagccgggtgtggcagcgcatgcctgtagttccagctactagggaggctgaggcacgagaatcgcttgaacccaggaggcagaggttgtagtagccgaagtcgtaccactgcactccagcctgggtgatagagcgagaagttgtctccaaaaaaagaaaaacaaagcataaatttgcaaggaaaaatagcagcaaaaaataggttatgttaaacaaacaaaggctagcaatagcgttggaaatcctcaaaaggagaagaaaaccatcgcaccaccagtgcctcctggacccgagccttcagggagtgtgtgagtccagcctggcccagctgccttggcgctgcttgttttcattgtcttcttattggccctttcccattctccttctcctctcaacacctttctacttctcttggccaccttgtccttttgtcctggcatcttgaagaaacaatagggaagcaagaaataaaaattagaggatggaaaaaagaaaggaagaaaggaaaggaaaggaagggagggaggaaggaaatgagcttttggatcaaccaaacctgaatcgaatcccagtgctaccatcagtcagcagggaaaagcgagtgttcatgaccttgagtggattttgtttcctctctgagccttgggcctattgggagttctgagagccctcagattccatctttcagctttgttggatctgtttggatttagggaaataagaggtggaaaggaggaagaaaggaacaaaaatttatttttattttttattgtcattatttttgagacagagtctcactctgtcgcccaggctggagcgcagtggcacgatatcggcccactgcaacctccacctacggggttcaagcaattctcgtgcctcagcctcccgagtagctgggattacagactacaggcacgcaccaccacgcctggctaatttttgtatttttttttttttttagtagagacggtggtttcaccatataggccaggctggtcttgaactcccgacctcaagtgatccgcccgcctcgacttcccaaagtgctaggattacgggtgtcagccactgcgcccggccagaacaagaatttaacgcactgcagagatggaggttgggaatgccagttctctacccttcccccaaacccattacccaagagagctggtgtccttttctccccatccccacagaggcggggagggttcactcatttcaagcatctccagtggaactcttagtgccctctatagatcttttggggaaggggccctttgagagtcccacggaagtgacagctgcagcgggaagggaggtagcatgggtgagctaaccactgcctcgctccaccgctggacactcttcccctccactgtccctcagcagccccatctgtgaaatgagattctggatttgggggaggattgaaatgagttaatagacattcaagtcttagagagctgcctggctcacaggaagtgcttggtaactggcagctgcttgttatggtccggctattgtgtgcctgtttcaggactcattcaatgacttgcattcacaacaaccttgtcatccgggaacggaggaaatactgctaagattgtttctcttcttggttgctgcctcaccgcttgtcctggagcccagaccattgatgtaacaaggattttctttctgaggataccatgttttatttgtgattcaagcctttttttttttttgagatggagtctcgctgtgtcacccaggctggagtgcagtggcacaaaatcggctcactgcaagctctgcctcccaggttcatgccatcctcctgcctcagcatcccgagtagctgggactgcaggcgcctgccac[160 bp omitted]ccttcagttaataataccttgcatttaggaagttgctttcctcccatcagctcaaagccctctacaaacatgacctcattcattctcccaggagtgggacagtcctaagtttcccagctactcatctccaaccggattctcagaagccaaaatatggattaagcacttccatgtctcaggaccacaaatcacgggctctgttgctctccttccttcttcctgagtgaccttaggcccacagaagataactagtacctgagtctctctggcttgggggccttgccctccatgccccgcccaggtgcccacagctgggccctgcaattgttaaacattacataaactggataaactgccttgatttccaggaaataacaggtttggcaactttggactcttgctttccttgggaacttacttctgaattaagacctacgggctcataggggacattccactacagccagaaatgtctctccccagggtagaccctcctactcacggccctggcatgtttgacacccgcatgtacttatgaaaacctggagccccacagtgacagtacttccttcttctgggctgcttgcggcctgagctccctggcagtgtatgctgccagctgctcacttttgttttcaccttgcaattactggacgggaaggctgcaagctatactggagtctccagccacacgccaggtcccagcccacgtgtacttcagggccattcccaggaaaaagctgactcctactccttcaaaacaaacaaataaacaaaaaacgaaccaaatggaatgagctcatgatagtacctgaatttgtttttcatcagtacagaaacattaacattaattgtaatcttcttcttgtttgtaaactttaaaaatacatactgtcaagttttcttagatagggagttaaatccaatttaggcaaagtcaagatagaaccacgacgtgctttcttattataagcctccttctgttctgcagacctttagctggttaaaatacactctgtaattagtagttcagataaaaaactcacaaagttctcctgaaacagaaactcttaacagtgaatccctaacaatatttatcttcccaatctcttctgccccttccccaatctgcttaaactcctagttcttttcctacccccacaattctcaaacacagccctgaagatcaaactctaatccagaagatggaagctcagcacatacaaacaaatttggggccaggcatggtggctcacacctgtaatccctgtgctttgggaggctgaggcaggaggatcactttagtccaggagttcaagaccagcctgggcaacaatagtgagatctcatctctaccaaaaattcaaaaattagtcaggcatggtggtgtgtgcctgtagtcccagctactcgagaggctgaggcaagaggatcgctcgaagttacagtgagccatgatcatgtcactctagccctatctaacaaccaccaccaccaaattttggactttaaagggctaccactgagaaacagtatctctgtagaaacactcactgtttgttattgtttgtttttatttggtagagatggagtctgtgctatgttgcccaagctggtgttgaactcccggcctcaagttatcctcctgtctcggcctcccaaagtgctgggattataggtgtaagccatcccaaccccagactccacccctactgccacccgttgtttttttaaaagatggtagaaattaaagcttcatcttagctttcgtgacaagcaagagaaaaaaaaaaaaagaaaattaaagcttcagttaggtcaaccgatttaacaagaaaaaattcttgacttggcattttggccactgagaaagtctcacttttttccttgcatatttccttgcatatcgtatttattgtacataaatcttggcttccatcttcagagagcaaagtctttggtctaaaaactgagaaaatactgctcgatccttgcggtgggtagtgattagaagagggcaggacgcgggttcctagggtgcaagtaacgttctgttaattgatctgggtgttcacttggtgaaaagtctggaagctgtacctgcgacatcgcactttcctaatgtacgttatatttcaataaaagatttttttaaattggactgcttgaaagttatttttaaaaattacatgcttttgagacttgagcagctgcaaaggctctgttttctattttgatcattctgtttctcgagatgaccacatctttcagaggaaatgagtcaaagccactctgtcttgcttttccagctgagcatgttctgtttcaatgaagtaatgaatgaacttggccgcaccacccccaagcctacaacagcaaacagagggccctcggccaatcagcaggcactccgggttttcaagttgagttcaaacaggaccaccggaggccaatcagagtgcgcggccccgccccgaacgcccggccgtgaccaaccacgaggccggatgagccaaaacacagcggccggccaatgctggggagccccacggcgccgagctccgccaatgggcgcggccgggcgaaaagagaaacagtgagggccccacaggccgcaggattcgaatcgaacgtccttacgggagccgggcgctggcggagcggcgccccggccaatcagcggcagtccccgaacgttgggccggcccagccccgccccgcgctgttgtttgtggtgtcggccgggccgcgggagtcgaaccacaacattcgccgggcgggcggcggcggagcgggcggcggagcggcggcagcagcggtgagcgcgagccccggagccccgggcggccggcctcccgcgcccgcgcagccccgcgtctgcgtccggccggagacgccgggccccgcgccgcgccgcgccatgtcggtgaacatggacgagctgcggcaccaggtcatgatcaaccagttcgtgctggccgcgggctgcgcggccgaccaggcgaagcagttgctgcaggcggcccactggcagttcgaggtgcgagcctggccgccgcggggccgggccgcgggggtcggggacgccgggcggcggcgggggcggggagcgctcctgttgtcggcccggaaggcgatcggcgcccgcgagcgggtcttacgcgggaccggggccgggaccggctcccctctgcacgtggggcagccgagggtcgggggccgcgggccgggcgcggaggcggggagagccggtggggggcccagccgctgcgtttcctgactccgcctggcccgccgtgtcactgccctgtttgtccgcagaccgcgctgagcacgttcttccaagaaaccaacattcccaacagccaccaccaccaccagatggtaagcggcggcgggcaggggcgcgggccggggccgctgtcagcgcggcggtgacagccatgttgccggggagcgccgcgccgcgaatgtaaacaaagagccaaaatgtcttccaggaaagagcggctcccgggccggcgctggcgcctccaactttgaggcccgcctcccgggctgctgctgcttggcctcgggactggtgcccggcactggtccctggggggaagcggcgccaaagttggggggagggggagagggccgggggcctggcgaggggctcaggagctgggggaccccagagccaggggatggggagggggagagggtgatgcccggacgtctggggcactgggaagcccgcgcgaagggcccagggagggcgatgggggtgcttgtgtttatggggaccccctcgtgctgttgagtggtttcccccctccccctccacacacacacacacccagcgctacagggaacaggaaaggcatgaatccaccctggctcaggaagccgggctctacccacaaagatctgttcaaccttccgaagcccaaggggactgggaagttggaaggacatacatcccccaagccaggaggacacacagattttgacccaagataaggccaggaatgtgtctttaatctctgtgttgagctccaccagcccagcacacagagaagtggtccggggtctggatttgctttctttttcattctagcccaggcccaagcttttgccctcctggccatggggtactctgctttcttgaggcccaggacatctctcctgtaccctacccccctagttacctattagccctgctgggggaggaggggcagggctcagcgatagggatcttaaaacattgttccccaggagagctgttgtggactctaggtgcatttttgggatttttaacacttggtgcccttgcctttggctctctgttttcatctagtcacagaggacaagtagaggggtctgtcttgaccttgttagctagtttttctcagaatggctgatgctgtatataaatcaagccaaaatggcatttgagtatgatgggagcatggtgctggccacagggctcttagaaacccaagagggtttcatctccaggggacaccgtcccctgcacttgaccaggagaaatggccagcacccgcctatgcttgagtctcgaagcttcctgccatctcctgtcaccggatccttgagatttccttccaccagctgtggccatcccaaaaaactcagaacttccagatactacagccattctgaggggctgagaacagggaggctccccaggaagagctggtctggcatcctgtttagttcctattgcccctcctctgcaaatcccaaggagatgctaagtctcttttgaagcttccctcaaggaaggcagcaggttttgtaacacacataaccagtgtgtccatcagtgcccaagtctgagtgccttagcagcacagtggaggacaccatccctgctctcaaaaagttcatggtttctttttttttttttttttttttctaattttatttttgagaaaggccagggcagggggagtctctatgtggcccaagctggtcttgaactcctggcctcaagctatccttccgcctcagcctcccgaagtgctgggattataggtgtgagccactgcacccagctggcaatttcttttctttttttttttttttgagacagagtttcactcttattgcctaggcggagtgcaatggtgtgatctcggctcaccgcaaccttcacctcctgggttcaaacgattctcctgcctcatgggattacaggcacgtgccacctgtaatcccacacctggctaattttgtatttttagtagagacggggtttctccatgttgatcaggctggtctcgaactcccaacctcaggtggtccgcctgcctcggcctcccaaagttcagggattacaggcgtgagccactgcacccggcctggcaatttattttggacaaagtaagtcaaaggaaaaagatcaaaaaacgaaacactagagaccagtaacagcaaaatggcaaaaccagaagtcatgagtaactgataaatggttgtcccgtacattactgtagattcccatagttggaagcttcccagttgataaggagggcttcccagttggaagtggagaaaggcactacagacttgaagtgggaggacaaaggtacaggggacaatgggttttcttgagaactggccgagagggcatatctggttcaaaaccctcattttacaaaagcagagagaagctccagagaggttcaggaacttgcccaagcttacacaggcaggccaccacaggcctgccagccatcatccctgctgttctctggcggctgtttgaggagacaggcctcgctggctggcggggaactggggaagtcggtcacgatgctgtgatgcaattggcctccacccccacccttcattcattgtttcctgctgccgagaagtcatccccagagggtggggggggggcagggagtagtggagggaggaggggaaaggtctgggtggggccaggcctctgcattgggtcctttggcctccccctgaggacccctagaaaggcaagggtcagagctcccttggtgccctgggtgctgacatggtgtggggctcaatggacagggtgtgctagtgtccccattccatgtatgttacacaccccctacacaacctccggtttctagctgtgaaagctccctctgttttttttttttttttttttgagacggagttttgctctgccacctaggctggagtgcagtgacgtgatctcagctcactacaacctccacctcccgggttcaagtgattctccggcctcaacctcccaagtagctgggattatagacgcccatcaccacacccagctaatttttgtattttttaataga[142 bp omitted]ctcaagtcgttcccccaactcctgcgcctgggggaggggccagtgttgctaaaattaggagaaattcaaagaaggactcctgtggcttcctgggaaagggagaaagcagctttgaggtcccagccagttttgtgtggtcttgttctctgtgttgcctcttgcccatgctgctgacgaggtgctcctggatggcactccagcccctgcccccagggtagtgacagaagacagcagatgggggactgtagctacccccaggaagaggactgaggggctggacagactgagaaactgccagcctgcaggcaagggcaggccagctgtgtttgtggcctgaggctacagacacaggacattgaaatccctggtttgtgtcctcaaggggcccagatataaaggggctcttgactctgtgcagcgtggcccagtagatgttaagagcttgggcctgcagacttgggagctggggaggtccgtcttctcaacttgccctctgctgtgggtgcattttcgggcaagtgacttgacttctgggcctcagtttcctcatttgtcataaagagaggataattgaagccactaagtgtcattgttaagggaggcaaagccttcaaggcctggtggctgtcacccttagtgtggtgtgaacccatccaccaaggtggcttaacttttccagggttggcacaggagggagagcctccccgctggccgctctcccttgcctagcagcctgggagcatctgagggtggctggtggggcagtcagctggtctccctgcccagggaaggtgcggaacagtggtgtcctgggctgcccccttgccctttcactttaatctgacaccttagctcctgggtgcaattaaccatttactttgaatgctcctcggggtgtcatttccaggcctcatgaaaccccgttggttttgataaggttcttgggttttgtccttgttttctgtttgtattgcctcggggagagggcacttttgtcctgtggaagctgcttgtgcgaaaatgaatgaagctgaaaaatgggagtaaaggagcggctggcctgggtaagccccatccagtggctcggggacccccgaggcagcctccccacacccgtgttctctcccgcagatgtgcactcccagcaacacccctgccacgccgcccaacttccccgatgcgctggccatgttctccaagctccgcgcctccgagggcctgcagagcagcaacagccccatgacagccgcagcctgctccccacctgcaaacttcagccccttctgggcctcgtccccgcccagccaccaggcgccctggatcccgccctcctcccccaccaccttccaccacctccaccgcccacagcccacgtggcccccaggagcacagcaggggggcgcccagcagaaagccatggcggccatggacggccagagatgagactggacgccgccgggcgctgggctggagctgggggcagcccagggttgtggggacacaggagggccagggaggggggagccggggagggcagggggtttcccgaagatcgcactggaagattttataaaagaatttttgtgggtcggggggacagtaaacttcctgggccacgtgggtccttcaggagtttttcaggcaagtttttcctctgtttttaatatataactataatatatatgaatagataaatataactaatgtgcgtgagaatgggcctggcacacctggggtgctcgggggtagggctgccatgctgcagagctgatggagtgatgttgtgggcacaaggcatctgtcagctgcctcctttaacagccatgccttctggaatctggaagaggacaccactcctgcagtcactgggcagccacatagcagctgcaggtcccaggagggcctgaggtcaaagctgtggaaggccctcttggtatcagggctctctccccatggcctcttccccacctctgattgctggttgtggccccatagctcatcacccctgtctcctgctgaatgtgcagggctgatgtggcactgaggagctgactttggtcaaaggccaggctctgcccagcaggggacttgactgccctgggcgccctgcccctcccgctgcgtgtccaggtccaaagtggagagcctgcctttgggtttagttcccgaatcagaatcccatctcaccagggcgaaattttaatttaaaaacttaaaaagagacttttctaacttccctggtttgcggtgcttttatttccgttggtgggaaaagcggtctcctcagaagaggggtggtgggggtcccttgccactgggctggtctggatgtttttgctgtgggatggtcacaccaggggctctgacagcaaggtccaggttggtgtggggaggagagaggggccggggtccgtcctgagtttctgtgaccttcccttcttggccccatcggtgtagcccccacccacagagccctagtgagaagagctggaagccattttcatctacagtggggagagcttccttctagctgggggcctcctgatggcccccccaggccctcccaggaagcatcttccagctgggctcatctccgatactcctctcctcagcttcccgggggcagtatgtccctttgggtcatggcctgtggagtggccatgacccaaagttcaattaaggctggcgggtccccagaggggcctgcttccattcccccttccccgcagccctgcaggcgtcagcatggggcgaggttaccagttcctgacccagcagctcgtcctcaggtggtcctgctgctcgggaggtcagctgcgtggggagcctgtccacctggctgatgggggtgatggccgcgtggctgggattcctcctccagccctgcccttcaccgccatacagtctgggcagccccttcctgtcccgtcctcctgcctcgccctctgctggggtctacggggcccaagtcttgctggaacacaggcaggacaagggttctggaggttcaggccggaagtgaaataaaagtcgagaggggccgggcccggcacccaccgcatcctgcctccgggcctcctcgggcccctcacacggtggggcagcccctcctccagtggagcggaacggtgggccccgctgcccctccacccctgcgtgtgacacggacgtgcttggaagctgggttcgtcctttcagttttgtttcctggttggaaacccctgagactcctccccctccccccgcccctgcccacctgtgctttcccaggctggaaggggcagcccctctcagcacgtgggtggttaggctgtgacgtccccaggcctcctgggcctgcaccggggtccacccaggtgtgggccatgcccaggtgcgggaatggtcgggggttgccctggccggcttagggaatgtcgctctgggaccttctgtgggcgtggggaaggcctgggtgaggagggctgggctgcacctccctgccaagctggtgaatttggcttctagacccgggaaactgagccaccttctgacatttcacagccagggtggggccgagagcaacaggagcccagctggagcctgggaggggtggccctgcctctgcctcctgcccggggagaaaggggctggggcccaggggtgcccgcccggggctccgctgtctgagcagctcctctcttctgtccagctctgagcatgacatcatcacatgaagactcccagggtctctgaagagcaggccaggagggagcggccacccgacccagccaagcctgccccgctttgcccacgcgggggtcaggggccagaaacctgtttctgggctgtttctcgccacattttcctttcctgtgtgattttgtctcctcacaccccaaagcgggcctcttactctagacatccctttcccatgctggggagatgggaactgggggtggggggagcccctttgtcaactctgagcacttccttttctctgaggagggagcctctgaggcagaaaggctttggtgacctcagggctttataaacctcagggtgggggggccactctcatctactgggggacccctagaatctggctggagcccaagctcaggaggtcaggggactccttggtctcaggagcttcaagtgggttgcagcagtgataggggctcgtctctagcagttgctgcactggcccaagctcagtctcacttgcagtcctctgtcccctcacctgccaagacctttagtgagtcccttgcctgcaggtgttggggctagggcagagggaagcaaatcacaagcgacaagcgccaggctcgcaccacctctccacccgccgcctggatgtctttttctaggaggggaatggggaaactgggtcacagccacagcagcccctgctctgtgccttcaggccccggctgtctctgcagcagcccactcaagggagagaagcggagggcggcaaacagaaacctgcccagccggctgcaggggttcgcctccagccattggcactgcttccccggaatcccacgccaggggtcaggaaccaccctgagccagcagcaagagcgcagcaggcagctgccaccctcacccccagagtgctggacactgacagcacgggccccagcaccccaggctagaaggcaggtctagagccagaaggcagggcacccccaatctagctgaggccaggagagagctggtggggtgagcaccggcccagctggtcccggggccaggagtctccctgtccccagtgcagtgtccagccctccgaagccccggcgcccttgaagaatggaagctgaggactcactttcaggctacaaaccagacccactgtccaagagaaggtctaccgagtgggcgggcctgggggtggtctggaggcacgtggggggctgcctggccaacagcgggtatttccctttccctccatcttcctgagccaggactgtcagagacgattcgccacacctaagcttcctcctgaatgtttatttacacctccgctcactgagcggtgctggaccgcggcccccgcgtgggctcctcgagcccctccccaggaggcatgtccacgtgcctctccagccccctgtttgccaccgcggcggagctgggcgggtgggctgtgttcggctgggagagacggccctcggaggaaggtctatctttctgttgacgagaagaaactgtaagacaggggtgctgaggttgctcaacacattccccaagcccaccaggggtcaccccagcctgcccaatgcccagggaggttgagagcagttctgttcgccatgctgggctgacacaggctggaggggagctgccggggccggggggcacggcgcaggcccatctgagctcctaagcagtcatgaagcacccttcatgatcttgtgaatgaaaaataagcaaacacgtccttctgcaggagccaagagctgcctctttggtactgtttcctgttaatacagacacgaggtgacatccacaccaacaggcacaggaattttcctgagactaccagtccctctctcctgcttccagggcattttcagtgcccttagagtagacactgggagaagggagctaagtattcccaagaaaacagagttctgggagccagggtgacagtcatgtgctcactgtccaccactgagacctgccgttcccagcacagcctctgggccagagggcttggctttgaactccagctctgccgcttcctggctgtgtgacctagagcaaggaccttcacctctctgtgcctcagttttctcagctgtaagtggtgctaacggcccctacctctaagtgctggtacatagattgaaagtggttcgtccatgtaaagctcctaaactacctggtctgtggggggccctggatgatgctgaggagccatgagcaccgcagccacttttctgttgtgatttcctcctccctcagcgccgggtcctcactgagggctggagtgatgctggagagcatctagccgaggggcaggggagggtggaggctctggttggggagggtccctgaacctcccacagacattcacaaggaatgtgggtgcataactgttttacaggaggaaggtcggcagcttttattagattcttggggggggcctgactccaagcagcactaacccagcacccccttgatgacagacgaggaaactgaggtctggagaggggagagcccttgtcaagagtgaccttgcccagggtcacttgtcagtgatccagcctcctggctgcagggccttgttaccaaaccctcctgaccttcaggcccaacttagctcctgcggagatcaaggacccaagggatcttccaggcgggaggcagagagaggttcctccatgacagggtcgtggcctcttggggacccgggcatggcctgtgcccagcagccaccatgcagagcccaggcgcacgagctccatgacagtgagtgcacgtgagcagggcaagggcatggacctggagccagagatgtgggtggtgaccctgtccctatttcatcttctgtggaatgggacagtaacagcacctacccacctcccagaaggggcacaaatcactcagtcactcggggttcctcttttccacacccatcccccccttcggctcccaggccctcccctctccggggagataaaggccctacatgagcaggaaagggggccggcagggccagcggggaggcctggcaggacgccccacccagagggaagctacctgaggtgttgccagccgaaatctgggcgctctgtggccgagagggcagctggccattgctgctgagggatggcggcctgtgcacgtggggcctgggctgctgggacttgcgctttgaggtccctgagcctgatgggggacaggagggaagggtcagtgctgaggcagcggtgagagctctgtgggaacccctgggggtggggagagggccgcagggctgctggtcatggccggcctcagctgagtggggtcctcgtcattctgaatttgtggctatgccccagagaagcggtcttcattcattctcgtggccacccacccactcacacagagtccctgaggacctgcacacgtcagccctgtgccaggtgtggggtgagttctgacctggggtttccagggcaggaagggaggcatctagaaaggcgcatacacagctaaatgcatgatgggaagtgacaaagcgcaggcttcgggcattgccacgggaggcgggcattcgggggctgaagcggtggggctcagcagagggcactgtgctgagttttgaaggaggaggaggccctgatgatgccatggacagaggccaagacaggagagcccagcagtgcagccgggatggaggctggcaagaaaacacggggccaccccatcccagctgatggctgaggctggacagctgtcctccacctgtgaacatttacttggtggcttttcgagagacctgcacatttggagtgaggggaatggagaaggaagacacccagggtctagtggcccataaaagtgccaggccccacaatggatgcacgccctgtgggacccacgtgaggtgcctgggggcctctggactccactcactgtcttttcggaggatgcctggcagccttgtgtccatccgtcccttgtaaatgtggccatccaggcccaagatgtccacctcatcatgctgtagaagtgaacagataccgtcgccactgtagcagccacagccctcccctggccccttcacacgggactgaggcacagagcactgtggtctcagaaccctcctggggggctctgggaggcactagggtggagcgagaaggtggagggaggtgaaacagtatctgggccacggtgggaggcctgggaggccggaatgctgctgggcaggcaggtggccggggtgaatctttcttcccagaaaagggtaagaacctgaggctttgactgggtctgattaaggaattgcctcaaggcagagggctggctgattttctggtggctttagagaatgactcaggaatctggagccatgtcagggcctccctccctggtggctccaggcagggccctgaccttcatggcaatctggatctcttcagtaggatacaggccccggggaaggtgctgcgggcggctgcggtggtaggggtaggtgagggtgtggctgcccccgcagcgccggggcacagttgagtaggtgtaatcagccatatctgtcaccctgtgatgaagacaggatggagtcattgggagcagaccaccagggatgtcacctgggactcacccacccatggggctgaccagagggaaggggcacagcttctcttcgggggctgccgggaggctgagcagcaggggcccagaacaggcgggcgggggtagagcagccgtgaggccgggccaccccagtgactgtgcacatgggcaggcgtgcacacacacacccacacactcacacatgtactcatacacacagtcacacacacacatacatgcacacacacatacttatgcacatacacacgaagatgcacatacacacgaacatatacatacatactcatacacatgcacacacacacacgtactcatacacacgtactcatacatgcacacacatactcaaacacccacactcacgcactcactcccacactcatacacacacgcactcatacacacacacccttacacacactcatacattgacacacccatagacacatggcttacacacatcacacacactaacacccctcgcccacactttctctcacacacacacactcccttttctcccccagcagtggggcaaggcatttgcacagccgtgcacgagcagaagccaagcctggtcactgggtgcctgctcccatggcctcgcccgcctctcctgtaccgtttgtagcagggggagcccaggcactgggcgtgcagcagctcgcggattatctggctgctggccttggtggagcccccgaagtggatctgcaccttctcaatgttcatcagcatcttggagtgcatggagcgcaggcgccccacgctctgctccatctgcgccaggtcaccccgagggaaggcgctgcccagcttgaggctgcagggtgtgagcagaacagagggagggttggcccatggcgggggccttgaccttgtgtaagccgaatccttcagttccgggtcccttttgtgcaggacccagctaggctgggggtcgctgggcagcttgacccctcagcagtagtcctttccacagcatctgagggccagacttgccgggaaggctttcctcagatggggaagtgcaggccagccaaatggaagaaagccctgctgcctgtctgcagctgtgggtggaggagctgagggcagccccgggccttcccatctcggcgcacctggcctagcatacctggaacccacagggctccaagagcagcctgaagtcctctgaactatggactcccatccttaggagaaggggagcagcagagaggtgggcaggagccggagggagcatgagatgcccaccgccagcctccttcgttggctgagcccaccctctggctgagctataccggaccctccccccaccgctctaatcccggggttgctgagacagccgaaggctgaggaagaggttgagaagtagaggagctctcagaggcagctggcgcccttgacgaagtcccaccgtaactcccaaaagcaggtgtgactaggtctgcctcctacgctcatgccttgggaactgccagggagctagttcagaaatcggcctgcggcccccactgtcccattccaaggaggaggctctccacactgtcccacagcactgccttctgtcacgttccgctgggccctccggagtcatccctgtcccctgccttccccatccagagccctggccccggacccatatgtcccatatgctgtcccatagcatacttgcggctatgctgccggacctgctccagttcaaacaccgtgtaggggcggatggaatggtgcccaggtaggcctggacccgcgggggtcacggggatggcactgggcagggacagagggagaaggggcgggtcagagtgggacaagtccggtcccccaaatccacctgcctaaagaaccttcccacccgcccccggcctggaagggagcgagggctggaagcagacacatgaaagaaagggagaggacaggtggacacaggtgaagggaggagacgcagccctgccatgcgaggccacgtgccggcggtgtgggcactcactgtccagtcacaggtgtctccaagggccggtcacatgagaggcagtggaaatgtgccaggagctgcctgttaggaatgggacgcacacgcagggtgagtgctctgcccggaagacccagaagggcttggggctctgcaggcccctggaagctcagcccaccagggtgcagatcatgtccctgctccccaggaatccatctgctcccacctctgggctcacatcccagacctccctgtcctaacccaaagccagcaggcttcccatgggcccctgagggtgccctgtgcaagtctcgggcgccccctggcggccacgaatgggaatcctggaattcaagcctaccacgggccaggtcctatgggccaggcccccaggagctgtctcagctctgggtactgaggacctctccctgtcccaaaggcccagcttagctcagccaaaccctgagagccttaagcctcccctcctccctttctctgctgtaatacgaaggggcctgagctagaagagcgtttcaagctctaaaattctgtccctccaaccatgggacagtcctgggcaggatccgctgtgtgctggcaggagctgtttgtctggagacccccagccccctctgccctcaccccctgaagagcgtgccagcctcctcccctgcctcccaggcctcacctccgcatggcagccgcctcgtctgcctggtagagtggggggcgctccctgagctgctgtcgcagcgatttccaccgatcctccagcaactgcttcactgggtccagctccaggcggtccagctgtggcggggaaagaggggccaggggacctctaaggaagcaggtagggggctgacccaggagaaggtggtgctgtcccgatcctgggggcaaggctgtgggatggagagccccgccatgcccctgcctcaccttgttgtccatctctgtgagcagcctgtccagcatcttctgccagtcctgctcctgcccgctcatcttggccaccagctcctgcatcatgtggttcagctgctccgtggtggcatcaaactggacacggctcactttggtggccagagcactcttgtcggctttctgcccagagacagacagaggtccccgcatctgggagatggccatggaggggccccattccctgggggtgtcgacccctatcaccaggcaggtttctgagagcccacactcgtctcgccagctcccctccactcagtctctcaaagaacagtcagcgagaccgccctgggacacagcgtggctcctggggcctggcacccaccacatcgatctccatctccaggtgctccctgttggccttttccttttcgagcttctccagaccctggtacagcatctggggaggccaagtgaacagagaaaaaaagagccagcagctgcggggctagggcaccacattgagccccggccccatcccagccaccctgcggccgctcacagcaatgtccttctgtttctgccgatggtcctcgatgaggttgctggtggtgatgttgagcttctcgcagtcaccctgcacctgcaggatggcactctgcacacggcccagcagctcctcgtcctgcggcaggagggatgggaaggctctcggaggctgctggcgcgatcccaccccctgctgccataatattgctgccccaggtaagttggcccttaaaacatctgcaaggctgggagcggtggctcatgcctgtagtcctggcactttgggaagctgaggtgaggcgagaggatcacttgagcccaggagttcaagaacagcctgggcaacatagggagaccctgtctcaaaaacaatggaaaacaattttccactaacagtgcgggaggccctctgtctgccctttctgggtgtccacccccacaggacacaagcgtcagtcacctacatccccatggactagccttgtgaccctggcctgccggtcaggggtcattagaggtgatggaggctcaggagtgatgtgctgtcccggggcacttgagagctgggctgtgggctttattctcccctcctctcctggcccaaatctgagttcctcagcccaagaggcaggacccaggatttgtggctgtgcccgcccccaccagcaagcctgccctttctagggaaattgagaaggggttggaagactcgcgtgccagggagtcaacatctcctacagttgggcctgtgtctccagggcacgcgaagggcactgatctgtcctcagccggcctgtgctgtcccaccccatcaagccagctcttccccatggtctcctgtccccaaagctagttctgctgctaccctcgctgtggacctgcagaaagaccagggactcttgtgggatctggctaaagggctccgccacggagagctgaccttgaggcccaaacacccgccccacttctgtgggtctgcagcagggtggccctcctctgtggggccatgtccagttgcagcaggagggaggcgagcagagccccacctgtctctggagcttggccttcttggagggtcgggagacggccaggctgttgaccatgtcttggagttgctcatagcgccgcaccagcgtgctgacctgatggctcacatccaggctgcaggctggacaggtggcctcagggtcgatctggccaggagccaaggtgtgggccttgtgcggggccatgctcatggacaggagcgtggaggaggaggtcagcatgctctcaatgatcatcctgagcttgtccaactgcgtgcaggagagacggcagcagcagggcagtgaggccagtcacggccacgctctgcccatgctggcactgcccctagcctgtgtgcctctcccctgtcgtgccctgggcagttgctgcatcctcagtgcctcccagagcatgtgccatcatgggcatctatccagtaaacggtgagtagagagagttctccgagaacacagtgtcaacactgaaccaagcccttgccagaagaaggcctctggagctttctccagccagcccaccagctcagcatgagaacatctcttctttagctaaatcgtaaagtgctgctgccagttagccgggccataaacacacagaggaccgtaatgacacacaggccccgccccaggctctggggctgtgaggggtgggcttgcacacgctcctgctcacatgccatggggaacggacatgctccatccacctagcatgtaaataactcacgatacaggaacttggcaggtgctgacactgctccaggggcctctccaaggctgggcggtgcaaaccccttccagggcaagtgccttgaaggctgccctggtgttctcctctgcatcccgcaggccccattcgtcaccccaaatgagagttcccaggtagacagctgatccaagggcagccggtccctcaactggccaaagacctgagacatgttgcttggctcaaaaagagaggctgggccaacctgggctcctctctggggagtgggtgatggaacagaaaggactctgcagggctggggcagccactgcagagcgcgagggagagcaaggtggattgagagtggaatgggagagtgacgtgggggctgagaggatgggtaaggagagggacacaggtacccacaaaagcagatgcagagggacaggtggggtggcccaccctggcctgcccccatggcctggaagttcccttttcctccacggcctacagctgcacatccccagggcagcatcctcttgcctgggctcacagagatgctgccacttacaaccagaagagcctgcccggaggcaggtacctccgagggccccggatgcagaaggactggccagttctctctcgaaaagaggaagaggcctcctagaaaaatgggcatttcagtggagtcttaacactaagccgcagctatctgtgtaaagaacagcaggaaagaataggagtgtgttcagagaaaggcaggaggccaaggtggctaaagatggggcatgtggaagtggggcctccaaaaaaagcctgcaaaaggaggctaggccagcccaacaggaagtggattgtctcctgagtgtggtcctgggacagccagacatgagcttggactgacaggtgactcttaaacgctcccagctgctcctcaggcaggactcctggcccggggtcatgacatggggcacaccacagttcca[137 bp omitted]atggtgaaaccccatctctactaaaaatacaaaaattatccaggtgtgctggtgggtgcctgtagtctcagctacttgggaggctgaggcaggagaattgcttgaacctgggagacggaggttgcagtgagctgaaatcatgccattggactccagcctgggcaacaagagcgaaactctgtctcaaaaaaaaaagcggggtgcagtggctcatgcctataatcctagcactttgggaggccaaggcaggtgaatgacctgaggtcaggagttcaagaccggcctgaccaatgtggtgaaaccctgtatctactaaaaatacaaaaaaattacccaggcatggcggtgtgcacctgtagtcccagctacccaggagtctgagataggagaatcacttgaacccgggaggtggagaatgcagtgagctgagatggtgccactgcactccagcctgggcaacagagcaaaactctgtctccaaaaaaaaaaaaaaaaaaaaaaaaaaaatgcacaaagaggttcctgacatgaacccgcttggcccagtggcttttcctaggtggttcttctgtgagcactcagagggctgctcctgattcagacaatccttagtgagaaaatgaccaagaattgcattgcaaggcttaaagacagacactgtcaagaaaatgaaaagatgacccacagaatgggagaaaatatttgcaagtcatctatcaaataagagtgtagcatccagaacatgtaaagagctctttcaactcaacaataaaatgacaaataactcacctgaaaaaatggatgaag[135 bp omitted]gaaggtgaaaccccgtctctactgaaaatacaaaaaattagccgggtgcagtggcaggcgcctgtaatcccagctgcttgggaggctgaggcaggagaatcacttgaactcagagggcggaggttgcagtgagctgagattgcgccactgcactccagcctgacaacagagtgagactccgtctcaaagaaaaaaaaaaaagatgaaaaagaaagtatacaaatggccaaaaagcacatgaaaagatgctcagcatctttagtcactagggaaacgcacatcaaaactataatgagatcccacctcacacccactaaagtggctataatttttttttttttttgagacagggtctcgctgtcacccaggctggcgtccagtggcgcgatcatggctcactgcaacctccgcctcccaggttcaagtgattctcctacctcagcctcctgagaaggtgggattacaggtgtgcaccaccacacccagctattttctgttgttgttgttgttgttgtttttgagatggagtctcgctttttcacccaacctggagtgcatggtgcgatctcagctcactgcaacctctgcctcccagattcaagtgattctcctgccccagcctcctgagtagctgggattacaggcacgtgccacctcgcccggctaatttttgtatttttttagtagagacggggtttcacc[138 bp omitted]tggccaggttggtctccaactcctgacctcaagtgatctacctgcgtcgtcctcccaaagtgctgggactacaggcgtgagtcaccgcagccggccccacacaaaaacttatacatgaggccaggccagtactttgggagaccgaggcgggtggatcacctgaggtcaggagtttgagaccagcctggccaacatggtgaaaccccattctctcctaaaaatacaaaattacctgggcatggtggcaggcacctgtaatcccagctacttgggaggctgaggcaagagaatcacttgaacccaggagttggagattgcagtgagccaagatcgtgccatttccctccagcctggataacaagagcgaaactccatctccaaaaacaaaacaaaataacaacaaaaaaacaacttattatggccaggtgcggtggctcacgcctataatcccagcactttgggaggccaaggcgggcagatcacaaggtcaggagattgagaccatcctggctaacacagtgaaaccccgtctctgctaaaaatattttgaaaaattagccgggcgtggtggcaggtgcctgtagtcccagctactcgggaggctgaggcaggagaatggcaggaacccgggaggcagagcttgcagtgagccgagatcgtgccactgcactccagcctaggcgagagagcaagactccgtctcaaaaaaaaaaaatgtatacatgaatgtgcatagcagcattattcataatagccaaaggatggaaacaacccagatgtctttcaactgatgactagataaagaaattgtggcatagacgcagaatggaatgctatgaagccataaaaaagaatggagtattgacacatgctacaacatggatgagccttgaaaacatcatgctaagtgaaagaagccagatacaaaagtgtatgttgcatgattccatttatatgaaatgtccagaatagacaaatccatagtggcagaaagcaggttcgtggttgtcaggggctgagggacagaagggaacagggagagactgctaagagtcacagggttctttctggggtgattaaatgttttggaattagattgtggtgatagttgcacaactttgtactaaaaactaccttattcaatttaaaagggtgaattcattgatatat[134 bp omitted]gaggcaggagaattgcttgaacctgggaggcggaggttgcagtgagccaagatggcgacactgcactacagcctggatgacgagagcgaaattccatctcaaaaaaaaaaaaaaaaaaagatagggaaagatcgaatgggaggtaaacaggtgttgtaggggttcctttcccttgccacttgtggactcagagctggctttggataaggaatctggatcctggacacattcgccaccgcccccccaccccctgcccacacaccacataacacacacacacacacacacacacacacacacacacacacacacatgatgggagggacctagtttttgatgagaggtgggagggcagggccaagccagctctgagaagggcccttggtccctggagctaaagagtggggaatcctcacctggtcctgcaggtaaagggaggcttcagagacagaattttccatggcagccttgcccctgtcttggctctccctcaactcggccagctccttttctatgtcagccacggtgactctgtggtgcacgatgagagactgccagactccacactcaggccagacccatgcagagcctgggccatcagggacgcagggggatgcagacacagctggaggtctctcaccctccacccccctccaatggattttgtctagggagtcccgggctatgcctctgtcctgggaggcttctgggcggtaggactgggcactgcaaagagagagctcagaggggccgtcagaagttgtctccttcagcctccgactggggacacagtctaagaagcttatttttgcatttccaagacctggtcctgagttgctttgggaacctggggaacttctaccagttccttgaactagacatggacaatgtgaagagcagacacaatccaggtcaaagacagtggtccattcaggggcataagggagccactggccgccatcacctccttggctgagaattcgtgatgccaggggaccagctgctcttagctggggcattttacctgaggacacccagctgcaatctcagctctccagctttcagttccttccctgcttcttgattcccttccccttccaggatcctctgcagcctttccacctacaaacccagtgaatgaggagggtcaggcaggcctgagctcccgcttcccaagtgtgcccttgcatgcagctcatgccagccctccccgttccctctactaacccaaccccctccgacaaaagccaggagcccttgtggacatccatccgcccattcatccatcccatggatgtagaaagctggcattaagagaatgactgggccaggcacgatggctcacgcctgtaatcccagcacttttgagaggccgaggcgggtggatcacctgaggtcaggagttcaagaccagccttgccaacaaggggaaacccatctctactaaaaaatacaaaaatcagctgggcgtggtggctggcgcctgtaatcccagctactcaggaggctgagacacgagaatcatttgaacctaggaggcagaggttgcagtgaggcgagattgtgccactgcactccagcctgggcaacagagcaagaatcagtcttaaaaaaaaaaaaaaaaaaaaaaaaaaaaaggaatgactgggccgggcgtggtggatcacacctgtaatcccagcactttgggaggctgaggtgggaggatcacctgaggtcaggagttccagacaagcctgaccaacatggtgaaaccctgtctctactaaaaatactaaaattagctgggcatgaacatgcatgcctgtaatcccagctacttgggaggctgaggcatgagaatagcttgaacccagggggcagaggttgcagtgagccgagatcgcatcattgcactctagcctgggcaacagagcgagactccgtctcaatttaaaaaaaaaaaggagaatgtctgaagggatctggccgtcccttgcaatgacctctggccccagaaaatccaca[143 bp omitted]aaccccatctctactaaaaatacaaaaaattagccgggcgtggtggcgagcacctgtagtcccagctacttgggaggctgaggcaggaaaatggcgtgaacctgggaggtggagcttgcagtgagccgagattgcgccactgtactccagccttggcgacagagtgagactgtgtctcaaaaaaaaaaaaaaagaaaaaaagaaaagagcaaagccctcattatttggctcagctgaatcataatagctttgagcatcagtttttaaaaaaaatttttttagagacagggtcttgccctgtcactcaggctagagtgccatggcgtgatcatagcttactgcagcctcaaactcaggctcaagtgatcctcctgcctcagcctcccaagtagctgagactacaggcatgcaccaccatgtctggctaatttttaaattttttgtagagataagtccttgctatgttgcccaggctggtctcgagctcccgggctcaagtgatcctcctgccttggcctcccaaagtgctgggattataggcatgagccagcgtgcccagcctgagcatcaggttttagatccaggaaatgaacacgatgatacccaaggtgcagttcctatctgataagattgcaaagatccaattagataataatgtaaaagaaagagctatttaatccgtaaaatac[137 bp omitted]acatggagaaaccccatctctactaataataatacaaataataatacaaaattagccgggcatggtggcacatgcctgtaatcccagctactcgggaggctgaggcatgagaatcgcttgaacctgggaggtggaggttgagtgagctgagatggtgccactgcactccagccagggcgacaagagcaaaactccatctcaaaaaaaaaaaaaagacaaagtgggttgactcttccttacttttgctttctcctgccaaacttctttggctagcgtctttacggtcttcagctgctcctgcagttcaggaggtatggtccttttgactatggaaagcagaagccttatgatcagaggggttagatctctagtgggctcccaatctccatttccagcccctgtaacactgaagctaccctagaggacagcaggacctattactttatcctgtgtctcctggtgactgggaaagggaggtgggaagaagggagagagagctgtccttagcccatgaaacatccacctaatgcctgacatcctaaagggctttgggacaactgactcccgaattccaaccactgcaaaaaatcttaattactctctgggcttggagttgggaacaggcaaatgttaagttttgttttgtttgagacagggtcttgctctgtcacccaggctggagtgcagtgatccatcacagctcactgcaacctctgcctccctggctccaacaatcttcccacctcagcttcccaagtagctgggactacaggtgtgtgccaccacgcctggctaattttttttttgttttttttggtagagatagagttttgccacattgcctaggctggtctcgaactcggcctcaagctatccacccagctctgcttcccaaggtgctgggattacaggtgtgagccattgctcccagtcaaaatgttaagtttaattcttcaacattctctcccgcccacctcccaatgctactgctctctataaccagacactttcccccactgctgtgcagagagcctgacaaagccacaagaacccgctccactcctctcctggggcttagttctctcctttgcccacccatttttttggactctgaaggctgtgggacatgctctgaatgacatgctgttttcagggactcagggagatgtgtagcagccaggagttgaggccaggggaagaaaaggatgaaaccaactgaaaacagagacaatggtttctcctctatcggcaagcggcacccacccatctgtgccagcaggaactggatcttctccaagtcggtttggccggcctgctcctcatccagatccttcatactctcctttagccccacatagaggctactgagctctcccatcagatgaaatgtctccactgccgtggggaaactagaactcattctacgcagtgaattgcgtcgctcactcaggacttcactcgagacttcgctcccttctgataagactcggtcgacggagtctggactcctgaaaagagtgacatcttggcctggggccttctgggcaggaattccatgtcggtccgaggctcgtgttctatttggatccaaaccttcctggccatgctgatcagcacttagataccctgggccacgataaccaggatacattgaatcatgactgtcaaagagagagaaagcatggccatgctgagctgcatctgggtatacctggtcatgctcacctgggccaggtgatgccacatgctgttgatctgggtgtgtagatcccaaacctgtactcagtggtattgggctgtgctggtctgtgccaggatgcatcaaaccttgctgataagtttctggtggtaccaaactccttcgatctataccaggtgatgccaaaccttgactggctaggagtggtgacacctggccgtattgttctctgccaggaggtaccataccatgttgatatggacgtactgatataaaacctgtagaatctgcctggaatgttgaagagccacgaagctttgtgcctggtgctatcaagcctggctgatatgcaccaggttgtctcaaaccatactgatccattcctggctgcaccagaccacgtggatatgtcccagattgagataaatcatgcaaatatgcaccaggttgtaccaaaccaagaggataggcaccaggttgtaccaggccatgtggatctgcctgaggttgcaccataccttgctgacctattccaggctgcaccatacccagctgacctgcaccaggctggaccaaaccaggctgatctgcaccaggttggatcaaaccacgctggtccattccaggttggaccaaaccacgctgatccactccaggttgcaccaaaccacgctgatccactccaggttggaccaaaccacgctgatctgcaccaggttggaccaaaccatgctgaactgcaccaggttggaccaaaccacgctgaactgcaccaggttgaaccaaaccacgctgatccactccaggttggaccaaaccacgctgaactgcaccaggttgcaccaaaccacgctgaactgcaccaggttgcaccaaaccacgctgaactataccaggttgcaccaaactacgctgaacttcaccaggttgtgccaaaccatgctgatccactccaggttggaccaaaccatgctgatctgcaccaggttggaccaaaccacgctgatctgcaccaggtgggaccaaaccacgctgatgatctgcacgaggttgtgccaaaccacgctgatctactccaggttggaccaaaccatgctgaactgcaccaggttgagccaaatcactctgatctgcaccagattgtaccaaaccatgctgatctgcaccaggttgcaccacatcaatctgatctgcaccaggttggaccaagccaggctgatatgcaccaggctgcaccaaagcacgctgaaatctgccaggttggaccatgccaggctgatctacaccaggctgtaccaagacaccctgacctgtgccagattggaccaaatcatgctgacctgtgccaggctggatcaaaccatgctgatctctaccaggttgggccaaaccagactgatccattccaggccagaccaaaccacgctgatctgcaccaggttgggccaaaccagactgatccattccaggccggaccaaaccacgctgatctgcaccaggttggaccaagccaggctgatatgcaccacgctgcaccaaagcacgctgaaatctgccagactggatcaaatcatgctgctctgtgccaggttgtatgaagccagttgcttccaaactgggctgcacaaaaccttgctgatctgcactaattggcatcaaaccaggtgataccaaaccatgctggtctgtaaaaggtagaaccaggccatgttgatcgacgacaggcaatgtcaatccttgctggtctataccagggggtactagtccttgctgacccatgcctgatattacacatccacgctgatccatgccaagtggttccatactgcgttggtctgtgccaggaaatgtcataccatgctgatatgcactgactgaaaccagaccatgttggtctgtgctaggtagttccaatccttgctggtctctgccaggtactgatggtggcaacatacgttgctcatccacgacaaatggtatcaattcccgatcatccatttcaggtggtggcacaccaagctgacccatgctgaggggtaccacaccatgtgggtaagtgctagcaggcactaatccaggctgattcatgccagttggttctaacccacgacgatctggccttagatggacctgactctggctagcgggcacactactgggctggtctctggccaagggtaagtcctgttgaactggaccaggacgtgcatttcttcttggttgtgtcgaggtaagcttctctctactcctgtgacgatctgagtctgatttgaattggaatgtagaagactgatggagtcgtggcacgccagcttcatcacgggccctcggctgctgctgtctcccagtaccagaggggaccttgctttgttccctactggaaaccccatcagaggggtgtgctgtgccaccagatcctgatgcagtccgatccgggccaagaccactggcagaatccagagcctgctcaatacttggttgcttggtagagtctccgcttagagtcccttcaggtgatgttaaggaagtgaaccctccgtgcttagaaaatcccataagtgtttctgagccctggttggagaggaagaaggaaatcaataacagtcaaaatattcactatcagagtgggaagaaaggaaatctggaagttctgactaggatgatttagggcccctggagaaaaaagccctctggtcctaaaagctaagcttgacataaagaaacacactgatgggaggccgaggcgggtggattacttgagatcaggagttcgagaccagcctgaccaatatggtgaaaccctatctctactaaaaatacaaaattagccaggcgtggtggcatgtgtctgtaatctcagctactcaggaagctgaggcaggagaattgcttgaacctgggagatggaggttgccgtgagattgtgccattgtgctccagcctgggtgacaagagtgaaactccatctcaaaaaaaagaaaaggaaaagaaacacactgacgttctgggaggctaggtctccatatttttgagactctgcatatttgaaaatggcatgtacaaaaatatgtaatttttgtggccaggtgcggtggcttatgcttatagtcccagcactttgggaggccaaggcgggtggatcatttgaggtcaggactttgagacctgcctggccaacatggcaaaaccccatctctactgaaaatacaaaaattagctgggtgtgatagtgcatgcctgtaatcccagctactcaggagactgaggcaggagaatcgcttgaacccgggaggtggaggttgcagtgagccgagattgcaccattgcactccagcctgggtgacagagtgagactccttctcaaaaaaaaaaaaaaaagtgtaatttttcttcataaaagatggggaaaactgcaaaatacaagtgatctctctggacttttgcttagcctttaaataaaggacataag[132 bp omitted]aaaccccgtctctactaaaaacaaataaataaataaataaataaataaataaataaaattagctgggtgtggtggcacgtgcctgtcgtcccagctacttgggaggacaagtcatgagaatcgcctgaacccaggaggcagaggttacagtgagctgagatcgcaccactgcacttcagcctgggtgacagagcaagactccatctcaaaaaataaataaataaaataaaataaaatataaagtttgctccattgttgacccattgctgctgataaaagtgtatactggaatgcatgtaaaccatatatttaaaatgtataggctgggcacagtggctcacgcctgtcatcccagcattttgggagaccaaggcaggtggatcatttgaggtcaggagttcaagaccagcttggccaacatggtgaaacctggtctctactaaaaatataaaatattagccaggtgtggtactgcacacctgtaatcccagctactcaggagaatcacttgaacccaaaaggcagaggatgcagtgagccgagatcacgccactgcactccagcctgtgcaacagagcgagacaccatctcaaaaagaaataaataaataaaatgtaaacatgcaaacccatggacccagaaactccatagacaggaattttctctatgaatcctcaccaaaggatgccaagctatacatacaatgatggggtctgcagcatcttgataaaatagatcatcaataagggactgagatatttctggtcaccaatacagtagatgctatgaatccatgaaaaagaagaatgaaccactgccatttccagccaagatgaagttaacaggggctgg[220 bp omitted]gaggcaggagaattgcttgaacccagaagtcggaggttgcagtgagccgagatagcaccattgcactccagcctgggagacagagtgagactctatctcaaaaaaacaaacaaacccaacaacagctatgaaacggtggtttcctacatactggatatcaagttatgaaggacaataatccccaagcggtggagaaaggaaaactgggaagcctgtatcaccctggcttgctgccttgctggagtttccagactgcagtgcagggagggggaattgaggtggagtctggcagactctctgagttgaggagacagaagtgagcattcagggagattcaggcaactgaaggtcacaggatagagtatcagaaagaagggagttatccaggcgtggtggctcatgcctgtaatcccagaactttcagtgggtggattacccgaggttagcagtttgagaccagcctggccaacaaggcgaaaccccatctctactaaaaatacaaaagttagccaggcacagtggcacatgcttgtagtcgcagctacttgggaggctgaggcaggagaatcacttgaacccaggaggcggaggttgcagtgagctgagatcacaccactgcactccggcctgggcaacagagcatggctctgtctcaaaaaaaaaaaaaaaaaaaaataaccagaaagaagggagatgacagaaagcccactcccactccagaggtctgtggaggatcccctccgagtgatgagcacgcatttgatgagtacatgcatgtggggagacgtcccaagattggggaaagaaccacctgcagggcttgaagaagcagtgccctgcctgccatggggctggaaatggtgcctgttcttatcaaccagtttggaaaaactcatcattcaagtagcacagagcagagtgtactcagaaaagtgttgcctcagaaatggagaataatcagccctagactgaacacacctatggacccacctaacaaatcataaaatcataaaagcaaggcctgaagcaatcaaactgtttttaagtagctgtgtcctgggggaaacaggctcaataaaatgtataagaatacaaaaatatggccgggtgtggtgtcccacaccggtaatcccaacactttgggaggcca[134 bp omitted]gaggcaggagaatcgcttgaacccaggaggcggagattgcagtgagcagagattgtgccactgcactccggcctgggcgacacagcaagactccatctcaaaagaaaaaaaaaatacaaaaatatgtaccatccaatgcaggaaaagtcacaatggctggcacctgatcaaagattgccaggcatacaaagaggcaggaagacatgacccataatgaggagataactcaaccaactgagaccaactcaacactggcatatgtgttagaattagcagagatggatattaaaacagttattatggctacacacacacaagcacacactttagagacagggtctcactctgtcactcagtctggagtgcagtggcatgatcacagctcactgcaacctttaactcctgggctcaagc[137 bp omitted]acctccgcctccaagtttccagtgcctcagcctcctgagtagatgggatcacaggcacgcaccaccatgcccggctaattttttgaatttttcagtaaagatggggtttcaccatgtaggccaggctggtcttgaactcctgacttcaggtgatccatccacctcagcctcccaaagtgctgggattacaggcatgagccacgctgcctggctttctggctaattttttttttttttttttttgagacggagtctcactctgtcacccaggctggagtgcagtggtgcaatgtcggctcactgcaagctccacctcccggcgccattctcctgcctc[135 bp omitted]agcctcccaaagtgctgggattacaggcatgagccactgcccccggccacgtgaccttttaaaaactttttgtagagacggggtcttaatatgttgcctaggctggtctcaaactcctggcctcaagcacttctcccgccttgactttaagtac[134 bp omitted]gattctcctgcctcggcctcccgagtagctgggattacaggcgcatgccaccacgcccggctaatttttatatttttagtagagatggggcttcaccatattggtcaggctggtctcaaattcccgacctcaagtgatccgtctgcctcggcttcccaaagtgctggaattataggtgtgagccacagcgcccggccctgagtgtagtttttatttgcttttgtagcttttcaaactttctttacagtctgtcctgaaatgcagggatctttccttattagtgggccatggtgacagaccctggaaataaaacttctgtagggggccctctgctgatggcaacttttgcacacaggcatgcatctgtctgtcttgagacagtgtacagatgaccaaattgttttccgatcgccaacctaccttcacctgaataaaatcaagctgaatatgttcaaatggccctcaaagatgaggcttaacttcccttttggtcttgacatccctcccgctggctttgggctagtgggttatcaaaacaagcaagccaactttgagggccatttgaaaatgtagacggaagcagggtgaagagtaaagcttttggcgccaccaagtggccatcttggggagcgccaaatatctgggtacaaaagacaacctgggatctccaggaccattttctgatttcagggctcattctcagaggaaagcggcatcagaaagatgttgcaagaggggccgggcgcggtggctccagcctgtaatcctagcactttgggaagccgaggcgggcggatcacctgaggtcagaagttcgagcccagcctggacaacatggtgaaaccctgtccctagtaaaaatacaaaaattagctgggcgtgatggtgggcgcctgtaatctcagctactcgggagactgaggcaggagaatcatttgaacccaggaggtgaacgttgcagtgagccaagattgcgccactgcactccagcatgggcgacaaagcaagactgtctcaaaaaacaaaactaaacgatattgcaagaggaccctgaacacaaaaggaatggactagaaaaaagtggcctccactttcacttttttaaagccaaaccttttttttttttgagacggagtttcgctcttgttgcccaggctggagtgcagtgatgcgatctcggctcactgcaacctccgccttccggtggtttcaagcgagtctcctgcctca[134 bp omitted]gcctcccaaagtgctggaattacaggcgtgagccaccgcacctggccaagccaaatcttttttgcacatgccactatcgtactgtttttaccgagcagtacatcttctcagggtgatggcggcagacaccatgagacttacacataagcatagacacctttaaacatttttacttctccagaggtaagaaagcatgtgcgtttgattactgctcataattatgaacaactccaaaagcaaataaagataaatataaatattaaaagattgttgagaagcaagagaacaagctctggtaatggccacttcagccctcgcacagaccaggatgaaagcagtgggggagtgccactagccccaggtaagcacatacaacacacctgagacaaatatgacctgagaccaatttgacctgcctgcatggttggtagagtcctttagcataaacgtaaaataaagattttgaaactgggtgttaacctccattatgggttttggcagacagtggtgactttatggaaattgtgcggtgtgcctgcatcatgagtagagggccaggattgagactgggtgcagtggctcaatcccagcactatgggaggccaaggctggcagactgctcgaggccaggagtttgagaccagcct[138 bp omitted]acggtgaaaccccatctttactaaaaatacaaaaaaattagccgggcgtggtggtgggcacctgtaatcccagctactcgggaggctgaggcaggagaatcacttgagctcgggaggtggaggttgcagtgagccaagatcatgccactgcactccagcctgggcaacagagcaagactctgtctcaaaaatgcaaaatattagtcaggtgtggtggcatgcacctgtagtcccaggtactcaggaggctgaggtgagaggatcacttgagtccaggaggtcgaggttgcagtaagcccttatggtaccactgcactccagcctgggcagcagagcaagactgtctcaaaaatattttttctttaacatgccctaacattacaacaaatgagccaaaatcttgaacaaaatatatgataggccagggcggtagctcatgcctgtaatcccagccctttgggaggccgaggcgggtggatcacttgagctctggagtttgagaccagcctgggcaacatgacaacaccttgtctctactaaaaatacaaaaattagctaggtatggtggtacgcacctgtggtcccaactaccggggaggctgaggcaggaggattgcttgagccccagaggggaaggttgcagtgagccgagatcacaccactgcactccagcctgggtgacgacagagactctgtctcaaaaaaaatgaagaagtccatttgggactcaaaatacattcactgattctaagatggacatcctgccccgacacccacacatacattttaacatctctgaaatcaggatgtatcttagagttggtggtgttttataatttttttttttttttttgagacagggtctcactctgtcacccaggttggactgcagtggtgcaatctcggctcactgcaacctctgcctcccaggttctatagattctcctgcttcagcctcccaagtagctgggattacaggctcctgccaccacacctggctaattttgtgtgtgtgtgtgtgtgtgtgtgtgtgtgtgtgtgtgtgtgtgtgagacagagtctcactctgtcagctaggctggagtgcagtggcacgatcttagctcactgcaacttcgtttcccgggttcaaatgattttcctgcctcagcctcccaagtgcttgggattacaggcatgtgccaccacacccggctaatttttgtatttttagtagagatggcgtttcaccatgttggccaggctggtctccaactcctgacctcaggtgatcccccacctcagcctcccaaagtgctgggattccagctgtgagccaccgcgccggccggcactcattatttataattcctgtcatcctcagaaatgacaggagtctcatctgatgcccttaatgaaaactgtaccgacctttctaggaccccgtttcccccccaccccacccccacctctgtagctgtcatgtccatttgtctaggacttcaaggtgtttgttctgaaaaaccattattttggttttagtcactatggtgtgctgaatataaactcccaaagatatccatgtccccatcccctgaacctgggagcattaccttacgtggtaaaagggactttgcaggtacaattaaggatcttgagacggagggagtatcccggattatccgggtggatgcagtgatgaagtcacaaaggtctttacaagaaggaggctgaagctgatatggccagaaccaggggctgccagccacacttagaggctgaaaatgaccaggaaatggattctccccccagagctgccagaggaaaccagccctgccaacaccttgacttctgcccagtgaaactggtactggccttgtgtcctcccgaactgtaagataacagatctgtgtggttttaagccacacagatcggtctctggtcatttgttggaacagccacaagaagcgcatactgtcccctttttcctcccgaggcactgcatgactgactggttagtctttccagtttacctacttttgtttttttttttgagatggagttcttgctcttgtggcccaggctagagtgcagtggtgagatctcagctcactgcaacctccgcctcccgagttcaagcgattcttctgcctcagtctcctgagtaactgcgattacaggtgtgcaccaccacacccacctaatttttgtatttttggtagggacagggtttcatcatgttgtccaggctgggctcgaactcctgaacgcaagtgatccgcccccctcgacttctcaaagtgctgggattacaggctggagccaccgcgcccggcccctcttgcaacatctttctgatgccgctttcctctgagaatgagccctgaaatcagaaaatggtcctggagatcccaggttgttttttgtacccagatatttggcgctccccaagatggccacttggtggcgccaaaagctttactcttcaccctgcttccgtctacattttcaaatggccctcaaagttggcttgcttgttttgataacccactagcccaaagccagcgggagggatgtcaagaccaaaagggaagttaagcctcatctttgagggccatttgaatatatccagcttgattttaatcagatgaaagtaggtcggggatcggaaaacaatttggtcatctgtacactgtctca[223 bp omitted]ggctgagacaggagaatggcgtgaacccgggaggcggagcttg[131 bp omitted]caccatggtccactaataaggaaagatccctgcatttcaggacagactgtaaagaaagtttgagaaggtataaaagcaaataaaaactacactcaggtacgatttttctattgatccagtgggttggcaaagctaaaaaaattgggtaccaaccatacagcgctggggggatgtcagggaacaagctctctctcccattgatggtgggggtctacactggaacagcagccatggaaggcaatttatcaatggctagccaaatcactaacacacatccctttctagggatgcatgttattcacacgtgaatgacaccttgttcttaagattggaaaaagcatttaaaacacccatatcaatgaaacttgcgaactatgaatatccatagaacagaatcctgtgcagctgtacaaagcgagaagttctggggagccccacccaagaccacggcccaggcccccactggttcaccgcttgtgaggctctccagccgtccgtaatcgcctgctccagctcttcccaggtgaccatggtgacttcttctgcaccaggaaccaaactcagcttccggctgactagttcctgacagtgacagaaaagacacacacatacaccccttgattaatcccaagcagctttaggaacagacttggtctaacaggatctgggtgggtccttcacagccccagccccagggagaattcatcacccttcaagtgaccagtgaaggttgggcagccagttatctgtcccatgtgagcacccagcagagcgctgggcagggctggggcagatttccctccaaccctggggcagagacttgagaggcagagggcacacactgcctgccctggatggacaagccctggagagagggccacactgagagacggccagccccctggagagccctttcccatggaactggctggtattaccaggaattgctcccgatctttgaatagcttctctagttcatcaacccgctgtaaaagtacctggaagaagagttcaggaaaggagaatgacagtggcccctacacacgcacactcacatgcacacacacacagatgcgcacacacactctcacactcagacacacacatgcatacacgcacattcacacactgactcagtgccaggagacgaggaaagggggaatttgtgtggctcttatggaaagggagggtttcttcttctacttgggtttttttggtttccttttttttttttttttgagacagggtcttgctctgtcacccaagctgcagtgcagtgatgccaccacagctcactgcagcctcaacctctcaggctcaagcgatcctcccacctcagcctcctgagtagctgggacttcaggcatgcaccaccacatccagctaattttaaacatttttttgtagagataagatcttgcaatgttgcccaggctggtcttgaactcctgggtccgagcaatcctccagcctcggcctcccacagtgctgagattacaggcaggagcccctgctttctacctggtttttacctggccagtcagcccaggctcctgggtcttttcccagccaagtgcaggaagggaagtgagatgcagtgggggacctggctggtagcatggcaggagtaagtgctgctgcagggatgggaccctttggtcctgggattcagtttgctccaacccacttgtgaaagcctgtaggatgaggcccaccttgccttacaaggaaggaagggtgccaggtacctcaacagtagctgaacatctgtgctatctaaagagaaaagcacctcaaaagaaccaaagcaaatcgctacaacataaggtgctatcatatttgggattaagaaaaaatatattaataaacaaaaataaaacaagttactttttataacttttgcaaacttctagaatctaagattacgtaaaaattaaaacaaaaggccaggcgcagtggctcttgcctgtaatcccaacactttgggaagccgaggcaggaggatcactttaggtcaggagttcgagaccagcctggccaacacggcaaaaccccatctctactaaaagtacaaaagttagctgggcatggtggtgtgcacctataatcctagctactcgggaagccgaggcaggagaattccttgaacccaggagatggagttgcagt[131 bp omitted]aaggaaagcagacatgcttcccagagcaaaagtgagttggtgctgcggtctcgagacctggggtgatatggcaggagggcatgagcggccagggctcccctgctggggcttggcctcttcttcctgcctcttcccggcctctttttcccctcctgtctctcctcttggcctccccacccagctgccttcctagttgcttctgctttttctttcagaaccaacctaaggtggctctgagacatgcacgtgtctattacctcctggcgctgacctgcgttgcttcctgctgttcactggacaatacttatactcaatgattacatgcatttgtccctccaagaaaacaaaagtccagttgaaggcagggctcagtggctcacgcctgtaatgcccagcactttgggaggccgaggcgggcagatcacttgaggtcaggagtttgagaccagccccgccaacatggtgaaactccttctctactaaaaacacaaatattagccaggcggggtggcgcgcgcctataatcccagctactcgggaggctgaggcaggagaatcgcttgagtctgggaggcggaagttgcagtgagccgagactgcaccactgcatttcagcctgggtgatagagtgagactccttctcaaaaaaaaaaaaagtccaagtgaaacggtcccctgcctgctgtggcttgtgtcatggccataggaagctgaggtccaactctccatcctgactccccttctctgggagcctttgtcctcaacacgtatctcttcatgtccttattcattttaaaaagggaattcactctaagaatcttctgagaagttgccggccccactctgagccagctctgggtccttggatgtctgataagtggtgggcgaacctctcccgtaaacaggggctaggaaggagggggtgggatggggccactacacttaggaggtggggtccccaggcccctccagctcggggaggccctaggccttttggtggcgttcttttaggattttcacgtcttgcagccccgtggactgcaaggtagagcatgggccactctatttagccagtcgcactgaggtctggcacctcctcggtccccatcccctccgtccccaccaccgctcacccctccagggtggtggggactcggctaggcctggagggcggcctggaggaggcagacggcctgcgcgtgcctccgtgtgcgtgctcaccctggcaaagctgagctcctcggcggcgtccttcatgatactcccagtccgcaccctatcgaacgcccgcacgcccacctcctgctcctccggccactctagcgcggccaggtcaagcccgctggcctgggagaagtgctgcacgtgcgtggcgatgccctgcacctggccgtccacacgcttgagctgcttgctcaggtcctccacctggccgcccaggtccttcacttggctctccagcgctgacgaaggcgcctggcccacgcccctgcgcttctcccggggcgcccccttgggcacctccttgggcgcgggcaggtgcgggatgctgaacgagctccggacggactgcagcgagcggctgggctcgggcgacgagggctggaagtcgatccgggtattttggaggtcgaggttcttgagcatggccacgatgagcgtgtgcagggccgtgaagttgacggcgcccacctctggcgtgccgatggagaggtccgccagctcccggagggagaccgtggtcgcgggcggcatcgtggctgtcaggagctgtgcgccgccgcggggcgccggccaaccacttcccgctcactgcacgccgcgccttggggcctttcgggggccctgcgaggtcctcggggcgcccctgccccgggtccggccgagtcactggacagagctcctgcctccagggaatctgcgcctccgctccccggcggggtccgcgatggccacccctccgctgtctgtcgctggcctcgggtccccgagctggagccctggactcccagtccccgcgccggcggacgtttgaaacgtgggggcccccgcgtgccctgaagattccacgtaacaacacgcctccctgcgagccacgggggcggggggaagtaaaggccaccacaaggatcacaaggggagccttggcaacgggctgaggaggcctcctaagatccagctagactccatccatccccttaacctagaaaggccaggattcactcactcttggcggggccacataaggaaagacttgagggtttcctggcaaccatgctttgtgtcatcagctgcgtccattccagagtggtggccccatgtctatggccccatgtctaagggatgcagtcctggggccctggtcccctcagacagtccacatattttgttcaatcaaaggtgaagcaacttggaaaagacaacccactcactattcaggcagttccaattagccactagatgactaactggtggctaattgtcccttttctgtgctgccataattttttttttacttttgagagggagtcttgctctgtcgcccaggctgtagtgcaatggcacgatctcggctcactgcaacctctgcctcccgggttgacatgattctcctgcctcagcctcccgagtagctgggattacagatgcgtggtaccatgcccggctaattttttgtatttttagcagagacggggtttca[245 bp omitted]gctaaaaatacaaaaaattagccgggcatggtaccgcgcatctgtaatcccagctactcgggaggctgaggcaggagaatcgcgtcaacccgggaggcagaggttgcagtgagccaagatcgcaccactgcaccccagcctgggcgacagtgcaagactctgtctcaaaaaaaaaaaaaaagaaaagaaaagaaaccactcacctggtcaagcgcctgtgcttgagctcattacaaagcaggattaaacagcacgagacaaatctggtgttaacaattgagacatgacttccccatacaagattcttcccaaaaacgtataaataaaacttcctaacagaagcacagcaaggctacttaaagagaacctatgaatgtgtgccatgcatggccagcctcctccgtgagctctgcatctgcagatttaaccaaccacgactgaacacgtacagattcctgtcatgattctctaaataatacagcatgaccaccatctacacaggatattgcagtaggtattacaagtcatccaggatgtgcatagcttatatgcagatactacaccattttctatcagggacttgcacatccatgggcaggaggttgagtcctggaaccaatcacccatggattgtaaggaataactgtactattttaactactgttcaagttcagatttttcacttcagcctgagaggtactgtttatttaattgaaggattttcgatcatcattatattccaataacttgggacacagtaggcctttaaggggttatcaaaataactagttctttgcagtctttttttttttttgagatggaatcttgctctgtcacttgggctggagtgcagtggcacaatctcagctcactgcaatctctgcctcttgggttcaaccaattaattctcctgcctcagcctcccgagtagctgggattacaggcgtgcaccccctcccccaacacccggctaatttttgtatttttagtagggacagggtttca[140 bp omitted]aatttttgtatttttagtagagacggggttttgccatgttggccaggctggtctcaaactcctgacctcaggtgatctacctgcctcggcctcccaaagtgcagggattacaggcataagacacgatccctggcctgttttttttttttgagacagggtgttgctctgtcacccaggatggatggcagtggtacaatcatagttcactgcagcttcaacctccttggctcaggcaatcctcccacctcagcctcccaaggtagctggaactacaggcacatgctaccaatgcctggctaatttttgtattttttgtagacatgggggtttcgccatgtttcccaggctggtctgaaactcctgggctcaagcaatcctccttgcctcagcctcccaaagtactcagattataggtgtgagccaccacacctagactttttttttttttttttaaagatttaaaatacagtattcaacaaggatttagcttcaacacttaggaagagggtggaacctgggaaagtgtttgtgtccagccacagacctgactgctgttctgtatccatggtcttctgctgtctaatgaaaagactagcaagacaacaaattattttatttgcaacttcagagccactcagatacccagaggtgggatgctattttctaatctgacatccttggaagatgtaacaacatgaatgcttcatttttcaatggctgtaggcataacaatttctgaaagaaaaatacgattctctataaaagacttgaagttgatttgggagaggccaactggatagtaatagggccacaggcgctcagcttccctaaccaggttcaacatcaatacctccatttccctggagctgaaacaactaaatgaacattatagagttaagactttatgtgcctttaactcctctttagtatcaataagattttcagattatttttaagaaagcagctagaacttttaaggaacagggctgatgacagcagacatgtaaggccatgttatgatatttatccattagctctgtcttcttcctgactcttttaatccctcctccccatcaatccgggcaaaagaagatatctaactccaggctgtttcgagtcctcccttgcaaggaaacactgtatcactcatggcactgctttttccatgtttccctcaggaggtccagggtcgagaccctcgtgaaagctagtcatccacagtgatgtttcggaaaaggtaggccatggactctccattgtggattctccgaatggcttcagaaagaatcaaactgatatccacagtctttatcttgggacattgcagcttctgaacctcatgagggacagtattcgtcaccaccacctagtcacacagtgatggaaaacaaacgctgttactgaagtctgttctccaagctggttacacagaaaagcttatctaacattgagttcccacagcctaagttccaaactacaaaaccttgttccaccgagtatagtttttataaaccaaaattaactaattttatgcaaaggaaaagttacatggcctcagaacacaagacaaaaatcttaggaatggcatggtctccatgcagaaacacagtgagccccagtgctatgcaaaactctcagatcataagggaagaattccagcctcaagagaaatgctcctagggtgtcaaattaaagtacccaagcaaaccgttatgcaaatagacatatacagaccctcaacataactctcaacttatgacagggttatgtctggataaacgcatcattataagttgaaaatattttaagtagaaaatgcatttaggccgggcacagtggctcatgcttgtaatcctagcactttgggaggccgaggcaggtggatcacctgaggtcaggagtttgagaccagcctggccaacatggtgaaaccccgtttctaagaaaaacacaaaaattaggcctggtggccggcgcgtgtaatcccagttacttgggagactgagacaggagaatcgtttgaacccgggaggcagaggttgcagtgagccgagattgccacactgcactcccagcctaggcaacagagcaagattccatctcaaaaaaaaaaaaaagcatttaatacgcctaacctactaaacatcattaacttggcctagccctaccttaaacatgcccagaacagttacattagactgcaggtggcaaaatcatctagggcaaaggctttcattttataataaaagcgattattttaaaataaagtgtctcaagtaatttatcgaatactatacattacatcgtaattgcaatggttttgcatcatcataaagtcaaaaacttctaagttgaaccatggtaagtcgtggactatctgtattcctaaacatgtatctgtcccaacgaactgctagccagcaaaagctagaaaagctatagacagattaagcaatttagtattgactgaatcattttattattcccagaaaacacagcagtaaatcttggctcaagatttagaagcagcctgacctcgtctacggaggactcctcaatcaggcgaggggcctctgcagacaggatgccgtgggtggccataacatagatcttataggcgcctctctctttcaggatctccgcggcagcaacaaaactctccacatcgtcaataatgtcatcctgggaggagaacagagtgagttggtaggaaagaaacaccctctagcccatactgtcaatgcacacaccactctactctcttctgcactcagtttcagaggatttctgatggaaaatcagagctgtgtgcctgggtcaaagaacgagcatccagaaatggcaacagaagcacctgacagtaccttgtgtgtctgtcagaggcgggcgcagtcaagcacctgtgacattacggctggagctgaggattgccaacactcattttcctgtctcacgtttctggtgaatcccacatagccagcgttccatttatttttttttcaaatagactgtgacatgagaagaaaactgaaataaagtgtgctactgcaaaggactcatgacccactagccagcagatatttagagctgggaaaaaaagtatgtcaacatgcagaacgagtctgcacggggacacccattcttacttgtgaaaacggaacagctcatcttcagttcatctttcggccctaacgctcaagcatgattaggtgagctggtttaaagaacctagaatccacatgatgaaggtgaaggtgctgaattttctcacgggagtactgtgctcatttcctatctgtaggttatactttaatgtatgttcacctggatacaggtttctgccacttggcacaagggagtttgggtgagaaaggatacatggatccattcggatcatcgttcctagaaatacagtcccagagtggacaacctactgaccaagagccaggagtgccacctctgcacatggatgacatataaccataccacgatgattgcgatgcggcctccaacatctccaactacagttatcggtggcttctctttggccatcatcactagcaaaacaaaacaaattacaagatctcagtcattcatgtatcactagagaaatgtaatcacaacctaattccctggaaatggtggcaaaaccactatacagacaaaaaacaaacaaaccatgcaaattccccctcaatgaacctgcaatctctcagaaacagcagcattggccaaaagaaatagaaggcatgccatacatgttactttgaattttctagtagccacattaaaaacagatgaaattaatacattttattttatgcaattcccaaaatattataatttcaacatgtaactgatataaaaatgtatgtatgtatgtatgtatgtatgtattttttgagacggagttttgctcttgttgcccaggctggagtgcaatgacgcgatcttggctcactgcaacctccgcctcccaggttcaagcaattctgcctcagcctcccgagtagctgggattataggcatgcgccaccacacccagctgagttttgtatttttagtagagatggggtttctccacgttggtcaggctggtctcgaactcctgacctcaggtgatccacccgcctcagcctcccaaagtgctgggattacaagcttgagccaccacgcccaacctgatataaaaattaatgagatgttttacacttttttttctcagaggggatcttgctatgttgccccggctcatttcaaactggaagcaaacaatcctcctacctcagcctcccaaagtgctaggattataggcatgagccaccgcacccagccttacacttttttcctatcaagtcttctctacttggtgtgtgttttatacgcacagcacttctcagttgagacgggccgtgtctcatgagctcagcagccagcacattgcactgcacagcacagctggaaagacaacgaaccagcagagcatggaagattctgccaacacggagaagctgcaccgcagtgctgtgtggatagaaaccccactctcacagagactgacagagacatgcagaaggaatgccgctctgcagaaagcgaaacagcgaaaggctgccagatcatgagatggctttatgttattttcttccaaagtcaccttatttggacagtgtaaccttactatcagataactgcactactgacataatcagagtttcctcaaaatcaggaacttgaagacaataactccaggcccatcatcttttcctgatttaattggtgcttaaagtagagacttttatctgactgcaaaatctgcatctgaagaaaggctatgagtgtacaaaggaaactacaggataaagaaaggaaataagattttatcctcaaaaggaggttagtaaacagagaagaaaaacaaagactacttcagaagaacaggctaagtattctttctttaaactttgttattattctgaaatatttattaggctagtagtgggggaagcgaaagagaataaaattcagggtaacaagagtttagtgactaccaacaaacaatttttgcagattcccaacaggcactgtgtatctcaaagaacaggtgtttttctctgtatactggcaaatcagttgagctgaaattcaccactactttatacatttcaacaaacatatatttcctgatttcacatcctagaaacaaagacaacttcttgaatttgggcaagacaagaaggctttgcatataaaatcacttaaaatggggggaggggggtttcaaaccaccaacattaggagcagcttcctgagattctgtttttaaattaaaccatgtaaacacgcagttatgttgacctatccgctttttttttttttttttttttttttttttcttgagacagagtctcactctgtctcccaggctggagtgcagtggcacgatctcggctcactgcaacctctgcctcctgggctcaagcgattctcctgcttcagcctcctaagtagctgggattacaggcacgtgccaccacatctggctaattttttgtatttttagcagaggtggggtttcaccacgttggccaggccacctttgagaggccaaggcaggcggatcacctgaggtcaggagttcaagaccagcctggccaacatggtgaaactctgtctctactaaaaatataaaaattagccaggcatggtggcacacgcctgtaatcctagctactcaggagactgaaacaagacttgcttgaacccaggaggcaaaggttgcagtgaattgagatcgcaccactgcacaccagcctgggcaacagagtgagactccgtctaaaaaaaaaaaaaaaaagaaaaaaaaaaagaaagattgcaagccaatacctctcatcaaatatcaatggaaattcagctctagtttgatgcggaaaacatcacagtatatttgtttacttttttgcaaccctacctcccacaaagaactactgttagtttcgcatgaaaaacctaggctctgctaggagggaggctaaaaaaggctaaaatgaaagcctttctgcccaatatactcattccctgctgatactgcctttaggttctgaataaaagtgaacacataatctggtggctgccacaaaacagagacagactttattattacagggtagaaaaaaatgactagtacctcacaggccaacagtttttgaatagcttacccaaaaaataaaacactaaaaattccagttttcatacaaggtcaagaatagagtgctaaaactaccctaagtttagattctgctctctctttccattttatcaaacaaaatctaatccatgaataaaatgaattgtgcaacattacttgcggccagaaatcactgtgaaaactacatcagctgcagtgaaaatgtttccaattcatcaaacgatttccaatgctcttatgaaggatgtaggaagttgtcttttgcttttaaaggtagccttttccaagtaaaataaagctgcactgacaaccctccttaccttacgcacgcttccatcacaagtacaagcacctgcacacatgtgcacacatttactctttcctgggagccaattaaccaaaccttcctctgctaaagtaaacagcaaaaaagaactatgagaaaattcattccttacccattttgacctttgtctatttctagttcaatgaaatgtcaaaccatatcaacaaactgacattaaaaagagatgagtggctgggcatgatggctcacgcctgtgatcccagcactttggcagatcacctgaggtcaggagttgaagaccagcctggccaacatggcaaaaccccttctctactaaaaatataaaaattagccaggcgtggtggtacatgcctgtaatctcagctacttgggaggctgaggcaggagaattgcttgggcccgggaggtggaggttgcagtgaaccgacatcatgccactgcactccagcctggccgacagagcaagactgtctcaaagaaaagaaagaaaaaaaaaaatcaacagtcaggcatggtggctcatgcccataatcccagctacttgggaggctgaggcaggagaattgcttgaacccgggaggtggaggatgcagtgggctgagatcgcccactgcactctagcctgggtgacagaacgagactccatctcagaaaaataaataaataaattagatgagtaaataaaatgaggtcttctgtagaacagaaatgaactgatttcaagctcataacccctatctgcatgcaaacaaatcaaaatttacatttaacatgctcaagaggtgccaatgtctgttttcacttcagtggtgaaaaccacatcttcactcgtgaaattaagaagccaggaaaagcgagccagaaaaagtgacctcctctcacttttgtgatccaaactcttacttttcacccctgtggcaaatgtagtcttcttcagcagaacccccaacatataatcttttcaagtttgttagatgcccttgcccatcatctgtatcaagtctacctataagatggaaaagatttaaggtttcactccttcattcatacaacttctcttttaacaaattactctaaaatgagcttctcagccttagcactactgacattttggactgggtgattatcacactgcaggatgctaagcagcatcctggcctttacctacaagatgccagcagcaccccagctcccatggttgtgacaaccacaaacatctccagacattgccaaatattcactgtgaggcaaaactcacccatgggcaagaagtagtgctctaaagaatgggtttggccaggtgcggtggctcatgcctgtaattccagcacttttagaggccaaggtgggtggatcacgaggtcaggagttagagaccagcctggccaagatggtgaaaccccatctctactaaaaatacaaaaaaattagctgggggtggtgtcaagcacctgtaatcccagctactcgggaggctgaggcaggagaatcgcttgaacctgggaggcggaggtggcagtgagctgggatcgcaccactgcactctagtctgggtgacagcaagactctatctgaaaaaacaagaatagatttgaggaaaataaaatagttcatcttcctaaaaaatgcaaagagtccaaggttgaatatttattctgtcataaccattctaagatcttaatcttctttaccaaccaacgaaccactggcacacattggataactgacacacagatgtgaggcatatttaatttgggaggtgcaatttattacatatacaagaaataattttttcagaattttcttggctaagcctattaaagagagtcacagaaagcaatgtgatgataactgtgaaagttgcaatgtaaacataccactatgtctagaagtaatgcactcttttcctatgacacacaaagatgactgccggggaaaccatggttatgaccgttaagcaacaaagcaacatcctcagaataaataatctcaccacataaaatactctgataatacaacatctatcaaaataacctctgacccagtaattttatttctcggtctttttttatttttatttttttgagatggagtctcactctgttgctcaggctggagtgcagtggcgtgatctcagctcactgcaacctccgcctcccaggttcaagcgattctcctgcctc[134 bp omitted]gcctcccaaagtgctggaattataggcatgagccaccacgcctggcctatttctcggtctttatcccacaacatactcagctgcttacaaaaggacattaaatcaaggtaactcacaggtagtgacgtgtggtaactgagcatgtccaccctgagcccaaatcttggtttctaaataccattctcagctggtctgatgctaatgggttatcaatacttattaatattagtgtcactaaaaagttggcatacaatccagcactgctaaatctgaccgatttattttatttttttttctagacggagtcttgctctgtcacccacgctggaatgcagtggcaccatcttggctcactgcaacctccgcctcccgggttcaagccattctcctgcctcagcctcctgagtagttgggattacaggtgcccgccaccatgctcggctaatttttgtaattttagtaga[139 bp omitted]aggtataagggctccttggagaaatggccaagtacagtgctaagaaagcacaagatgaacacggggcgtggttatagcacaaaagtaagggagtctccaaaagtgttggggacatgccaaaagaacacaggaggcagctgcaaggagctctctctggccaaatatgagacaaactgagcattaaaataaatgtaggctgggcatggtggctcacatctgtaatcccagcactttgggaggccaaggcaggcggatcacttgaggtcaggagatggagaccagtctggccaacatggcgaaaccctgtctctactaaaaaagcaaaaattagccgggtgtggtggtgcatgcctgtaatcccagaaacttgagagaacgagccacgagaatcacttgaaactggaaagcaaaggttgcagtgagctgagatagtgccagtgcactccagcctgggtgagacaagaaagaaagaaaagaaagaaagaaagaaaagaaagaaagaaagaaaagaaaggaagggaggaagggaagaagggagggagggagggaggaaggaaggaagaaaaaggaagaaaggcaggcatacttcattttattgcactttgctttatgttgctttgcagataatgctttttttttttttttttttgagatggagtctccctttgttgcccaggttggagtgcagtggcacgatctcagttcactccaacctctgcctcccaggttcaagtgattttcctgactcagcctaccaagtagctgggactacaggcacacaccaccacgtccagctaatttttttttttttttgtatttctagtagagacagggtttcaccatgttggccaggctggtctcgaactcctgacctcagctgatgcacccacctcggcctcccaaagtgctagattaccagataataaaatttttacagattgaagtttgtggcaaccctgtgtcaagcaagtctatgggagccatttttctctcttttttttttttaaagacagggtcttgctctataacccaggctggagtgcagtggtgcgatctcggctcactgcaacctctgcctcctggactcaagggaacctcccatctcagcctcctgaacagctgggaccacaggtgcatgccacacctggctaattttttgtatttttttttgtagagacaaggtttcaccatgttgcccaggctagtctcgaactcctgggctcaactgatcctggcactttggcctcccaaagtgttgggactacaggcatgagccaccgtgcccagccagggtgccatttttctaacagcatgtgctcgtttcatgtttctgtgtcacattttggtaattcttgcaatatttccacttttctcattattgttacgtcttttctggtatctgtaatcagtgatcttggatgttactattccaattgttttggggcagcatgaaccatgctcatataagatagcaaactggctggatgcagtggtggctcacacatgtaatcccagcactttgggaggccgaggcaggtggatcatgaggtcaggagttcaagaccagcctgaccaacatggtgaaaccccgtcgttactaaaaatacaaaaattagctgggtgtggtgaagcatgctactcaggggctgaggcaggagaattacttggacccgggaggcggaggttgcagtgagccgagagccagagtgaaactctgtcacacacacacacacgcacaaaaaaaaagacagcaaacttagtaaatgtgtattctgactgctccactgacctgctgttcccgtctcttcctcttgttggacctccctattccctgagacacaatatattgaaattaggccaataaccctacaatggcctctaagtgtttaagtgaaaggaagagccccatgtctcttactttaaatcaaaagctagaaataattaagcttagtgtgtcaaaagccaaaagctacacctctttagtcaaacagccaggctgtgaatgcaaaggaaaagttcatgaaggacattaaaaatgtgactccagggaacacacaaatgatgagaaaataaaacagccttattactgatacagagaagtttgagtgatctggatagatcaaaccagacacaaaataaaattcccttaagccaaagcctaatccagagcaaggctttttcatgaagtttaaggaaagaagccgtttccgtgacctaagagtgcaaggtgaagcagtaagtgctcatgtagaagctgcaataagttactccgaagatctaactaagataattgataaaagttcaaacaatatcaaacaacaggccgggcgcagtagttcacacctgtaatcccagcactttgggaggctgaggcagttagatcatttgaggtcaggagttcgtgaccagcccgaccaacatggtgaaacctcatctctactaaaaatactaaattagccaggcgtggtggtgtacgcctgtaatcccagctactcgggaagctgaggcaggagaatcgcttgaacccaggaggtgaagattgcactaagccgagatcgtgccattgcactccagcctgggcgacagagcaagactccatctcaaaaaaatatatttatcaaacaacagtctttcgacagctctgatggagatacacaaggagattagtgatgttttcatgcccgctaatacaacatccattctgcagcccattgaacaaggagtaatttcaacttccaagtcttattattaagagtaataacaataaggtgatcctcccacctcaccctcccaaactgtcaagaatacaggctgaggcgggaggattacttgagccaatgaatttgataccagcctggacaacaagacaagaccctgtctctactaaaaatttctaaaaattagctgggtgcttgggcacagtggctcatacctctaatcctagcacttcgggaggccaagatgggttgactgcttgagcccaggagttcatgaccagcctgggcaacatggcaaaactccgtctccacaaaaaatacaaaaattagtcaggtgtggtggcacgtacctgtggtcccagcttccaagctactcaggaggctgaggtgggaggatcacctgagcccaggtggtagaggctgcagtgagcagtgatcgcaccactgcactgcaggtctgggtgagagagggagatcctgtcactgtactccagcctggacagcagacagagaccccgcctctaaaataaaataaaaagaaatacatttggctgggcgtggtggctcacacctataatcccagcactttgggaggctgaagcacgcagatcacctgaggtcaggagtttgagatcagcctggccaacatggtgaaaccctgtctctattaaaaatacaaaaattagctgggcgtggtggtgcacacctgcaatcccagaaactcgagagaatgaggcacgagaatcacctgaacctggaaagcagaggttgcactgagccgagattgcgccactgcactccagcctgggtgacagagcaagactctgtatcaaaaaaaaaaaagaaatacattttataagactatagatgccatagatagtgattcctctgaaggacccaaagtaaactgaaaatctctggaaaggatgcaccattctagatgccatgaagaacacgcgtgattcatgggaggaggccaaaatatcaacattaacaggagtttggaagaagttgattctaaccctcatggatgactctgaggagttcagggcctccatggtagaagtaactgcagatgtggtggaaagagcaaaagaactagaattagaactggaacctgaagctgtgactgggctgcttcaatcttatgataaaactgtaatggataaggagttgctttgatagataagcaaagaaggttttttgtttttttttttgagatgaatctactgctgaagatgctgtgaactctgctgaaatgaaaacaaggatttagaagtattacaaaaattatttgataacacagtggcagggtttgagaacagtgactacaattttgaaagtagttctttcggctgggcgcagtggctcacgcctgtaatcccagcacttttggaggccgaggcgggcagatcacctgaggtcaggagttcgagaccagcgtggctgacatggtaaaaccctgtctctactaataatacaaaaattaggcgggtgtggtggcacacatctgtaatcccagctactcgggaagctgaggcagaattgcttggacccaggaggcagaagttgcagggagccgagatggtgccactgcactccagcctgggcaacagagtgagactgtctcaaaaaaaaaaaaaaagaaagtagttctttcttctaggtaaaatgctatcaaacagatcattttgtagttcataagtgtgatcattgggtgttcacgcttacatgtgagatgtgccatccttgaaccttgttagaaca[136 bp omitted]catggtgaaaccctgtctctactaaatacaaaaaaaattagccaggtgtggtgatgcatacctataatcccagctacttagggaggccgaggcaggagaatcacttaaatccaggaggtggaagttgcagtgagccaagactgcaccactgcactccagcctgggcaacaagagcgaaaactccatctcaaaaaaaaaaaagctataaaacagcattacatgctacagaaagatcttttgtgaaaggaagagtcaatcaacgaggcaaacttcgttgttttaagaaattgccacagctgagcacaatcactcttgcctgtaatcccagctactcaggaggctgaggtataaaaattgcctgaggctggcagggtgcagtg[131 bp omitted]aggtgtggtggcaggcacctgtagtcccagctacttgggaggctgcggcaggagaatggtgtgaacctggggggtggagcttgcagtgaactgggtgaaccactgcactccagcctggacgacagagagagactcgtctcaaaacaaaaaaaaaaaaaagaaaagaaaaattgcctgaggccaggaattcaagaccaacctgggtccgggcacagtggtttacgcctgtaatcccagcactttgggaagccgaggcgggcggatcatgaggtcaggagatggagaccatcctggctaactcggtgaaatgccgtctctactaaaaatacaaaaaattacccgggcgtggtagcgggtgcctgtagtcccagctattcgggaggc[140 bp omitted]gaaacagaccccatctcttaaaaaaaagaaagaaaagaaatttccacagcccatcccaactttcaacaaccaccaccctgatcagtcagcagccatcaac[139 bp omitted]tccattctcctgcctccatgccattctcctgcctcagccacccggtagctgggactacaggcgcccgccactacgcccggctaattttttgcatttttttagtagagacgcgatttcacagtgttagtcaggacggtctcgatctcctgacctcgtgatctgcccgcctcagcctcccaaagtgctgggattacaggcctgagccattgcgcctggccaactgctagtattttttagcagtaaagtatttttaaattaaggtacgtacattggtttttagacacaatgatattgagcatttaacagactacagtataaacataacttttacatgtgctgggacatcaaaaaattcatgagactcactttattataatattcacctactgcaatggtgcagaactgaacctgcaatatttaaggtattcctgtgacgacaatgaattataacccactgaatgaaataggcctatgaatccatactgatataaatgaagaaatgaatagggaagaagagaaagctttcttgcattagaaggtcaactaataaatgtagaaggaatgatagagttagaaaaatgaacactgacaacaatcacagtcaataattgattcaggcaagaatcatcagtagatgttcattttgatgagaagcagaatatttacagttaaaacatagtcttaacatgaggtagtattaattacaaagaggaaaaaaaaaagagtaactttacagtggagaaacctgccagagaaaccttaaccaacttatcagaatgcacatcaccagtaatgggacacatcatgtgtttcctgtgattttctgccaaaaatgcataacctgaatctaatcctgaggacacaaacaagccccaattaagggagagtctacaaaatcacttgatcgcactgttcaaaagtatcaaggtcataagaaacaaagaataaagcagccactccagattaaatgagactaaaaagaaatgacaactaaatgcaatgtgtgaccctgggttaggtcttgaacaagaaaacaagtttattcttttgctctaaaggacactgctgggaccactggtgaaacctgagtaaggtctgtagattacagtgttacagcaatgttagcttcctgagtctgataatgatactctggttatataagagtcttttgtctttacaaatatacacgaaggtatttaggaatgaagggacattacgtctgcaactcaccctcaaatggtggaaaaaaaaaaaccccatgtatataaatgttaaatttggggactccgagtgaagagcatatgctggaaatctgtactattctttcaactttaagtctaaagtcagttgaaaataaaaagctaaaaatgcagattacggcttggcacggtggctcacacctgtaatcccagcacactgggaggtcgaggcaggcggatgacctaaggttagcagctcgagaccagcctgaccaacatggtaaaaccctgtctctactaaaaatacaaaaattagctgggtgtggtggtgtgtgcctgaagtcacagctacttgggaggctgagacaggagaactgcttgaacccaagaggcggaggctgcagtgagccaagatcatgccactgcactccagcctgggcgacagaacgagttcagtctcaaacaaaataaaaataaataaaaataggccgggcacggtggctcacacctgtaatcccagcactttgggaggctgaggcaggcggatcacaatgtcaagagatcgagaccatcctggccaacatggtgaaagctcatctctactaaaaatacaaaaattagctcggcgtgttggcgcgcacctatagccccagccactggagaggctgaggcaggagaattgcttgaacccgggaggaagaggttgcagtgagccaagattgcaccactgcactccagcctggcgacagagtgagactccatctcaaaataaataaataagtaaaaataaaagttacctgatccccaaagcctggtatttgatcaacagctgtcacccagcttatgataatgtaaaagcttaagatttcacaccatcacacatacaacttttttactgaagctaaaattatcaaacaccgtctgaatgctgagtgctacgcagaaccgtccatacacagtctacaaatgtgtataacacaacttccttttacaaaagaggaaatcgggcctggcatggggctcatgtctgtaatcttatgtaatctcggcattttgggagaccatgacaggaggattgtttgagcaaagaagttcaaaaccagcctgggcaatgcagggagccccgtctccatacaaaaagaaaaaaaaaggaacagaaaactatccaggcatggtagtgtacccctacagtcccagctacccaggaggcggaggtgggagaatcacttgcgccccggtcaaggctgcagtgagccatgactgtgccactgtacagagcaacagggggagatcctttctcaaaaaaaaaaaaaaaaaggcggaggatagcaaataccattccattattaaaaaacaacaagacagcatatatctacatagtcgataactcctagccattcatactacttaaaactttcttcagggccaggtgcagtggctcatgcctgtaatcccagcactctgggaggctgaggcgagcagatcaccaggtctggagcagatcacgaggtctggagtttgagaccagcctggccaacatggtgaaaccctgtctctactaaaaatacaaaaattagctgggcgtggtggcacacacctgtaatctttgccactcacgaggctgaggcaggagaattgcttgaacccaggaggcagaggttgcagtcagccaagatcacgccactgcactctagcctgggtgacagagtgagactccatctcaaaaacaaaacaaaacaaaacaaaacaacaacaacaaaaccaacaaaaccaacaaaaaaaaactttcttcaatttacaaataaaataaaaacacagagctcatcttacatggcaactccaggcctgggtgcacagtagcatttttgaccataggcggggagtgacgaccatcgtccatgtccagttccgtgcactgagcttccccgtgaatgacggccaaacccagacgcagtctctccgcataggactgggccctagaaggacaaagggaaatggtgaaactgacaggaagaaatcccacgcatcactacggcatcattttttaaccataaaatgaaaatatttaacgtttcagggacatacaaaggcattatttatataaatgagaatgtgaggcccaggccagcatgtaaatgactcaaagggcacgtgagttagggtttgggattgtatctgattctagacatttttttttttttttgagacaaggtctcactgtcacccaggctggagtgcagtggcgtcaacatggctcactgcagcctcaacctcctgaggctcaggtgatcctcccacctcaacctcccgagtagcggggaccacaggcatgtgttgccacaactggctattttttgtattttgtagagacggggtctatgttgcccaggctggtcttgaacccctgggctcaagcgatctcccgctttggcctcccaaagtgctggaattacaggcgtgagccaccccgcctggccctgattctagataattttgattctatcctttgtccaatattctgatagtcatcttcagaagaaagaacaacgttaaaaaccattgcctgggccgggcacagtggcttacgcctgtaaacccagcactttgggagaccaaggcagacagatcacttgaggtcaggagttcaagactagtctgatgaacatggtgaaaccccatctctactaaaaatacaaaaaactagccaggagtggtgacaggcgcctgtaatcccagctactggggaggctgaggcaggagagctgcttgaacccaggaggcggaggttgcagtgagccgagatcgcgccattgcactccagcctaggtgacagaatgaaactccatttcaaaaaaaaaacaaaaaaaaaaaccattgcttgaaaaatgctcatagcctcattgctttcctttctctgagaacttgaaggaactttgttttcccagaggaaagctgagcaactcagcgatcatgtgtgctgtctggaggctggagataaagctgtgtgtggcatgggacatgacaacgatggaggggttaacatgagagccagtgggctttcaaaggccacgagtgacagcctctggattccaaagcagctcattctgacttcgggagcactcaggagggatcaggacccatgtctagcttacttacctctttgcagcatcaggagacttagctacaatgactgcatttctgtaatttggaatctagatttgaaggaaaaatagaaaatactgaaaagttatcagaaaataacacctggatgctggtattcaagttttccctcttataatgatccaaactagtcatcaaatatgctagaattttagtcacaagttttagatttttcaatatttatcaattaacatcactggaaaaagcactcctacgtcaagaattttttaaaaataattcttaaaacattcattttagaaaacataagcaaattgctaaagatacgtagaaaaaaaatctgtttttagtgtcttttaaagctatgatcgtccacgactaaagctgaccctgtctgctgcctcaggcattgtgacttaagggagagctcatttgatgtgccttccagtaacgaaatctgataccagagaaaaactaaataagatctcttttgaggacaatggggtgtttgctggtggttcctcacttcttcctggatatactgaagcaggaaaggtgaggctctaaggttgtccacaggaaagctgaaaaagccttgtatttccttttgatgaagatccatagtgataatgtgagttaaacctgaaattttaaaacaaaaaattacaaagttcacccctacaggtaaatggctacagtggacctaaactagatgctcaactcctgcttcctaccagcagactgaagacggggtactgtgattaagcactgcagtcacaggcttgattgttaaccttaataaagccttaatgtagagaaggctacaaccttccacatggacaaagaactaaagctaagaaagtgggaattattgacttttggcttggtccagaaaattgagaaaagaataatgtggcagaagcaaaaatatgaatatggaattaataccgaagagatggaaaaaacagtaaggccttgattacagaatcttaaaagaaaggataaagaactgtagcgaaggcaaaaagtagcaagaacacaaacgcaaagtaatatacatattagaagaaaagaaactcatataacacaaagatattgaagcttagaataatttctgtatgtaacaaagaatgtttcaagtattcttatagaaaaacaatgaagagatactcttataatcaagagtactgaagaggaaaaggtacatatatataaacacattgcaaatggtcaaaggtcacagcaaaacttccagggtgtagaaccagtattacttgttctttccagaaacactatagttttttggagaggatgaaattcacatacagttgaccatctggatctatgggttccacgtgtggattcaacgaaacacagactgaaaaggtagttaggcctacaatggttgtgtctgtactgagcaggtatgaaacttttttctcatcattattccctaaacaagacagcataacaacaatttatatagtgtttatatggtattaggtatttataaataatctacagatgactgtgttggttatatgcaaatactatggcattttatatggaagacttgagtatctttgggtttttgtatctgctgaggagccggggaagcgggagatgggttcctggaaccaatcctataaggacattgagggaggaccatacatttctttccgaggacccaaatatacgttaaagttttagaacagacatcagatgaatagaaacccaattgtaaaatattacattgatttacaggccagaaagcgtgcccccgccacacaaggagaataaagcaatgaaaatgagccactatgtagaaaggcaagggtgggggagagggagtaaaagaaaatccagcttgaatactatgaacaaaaatggaatttagctaacaaagcagatatagaaatctagacctgaagatcaaaagatcacataagaatgccaagactgccagctaagaatttagcgatgacaagatgaaatagaaaatatgtgacagatgacagagaagagaagacactaaagcaatggtattctaaagtaggacaaagcgaataagggaaaaaaaagaatttctaaccgagctcacatatccttagccaaaactgttcaaaaggaaacaaacactcagatcccagattggatatctgaggtatgagctaagtccaactaggaaagagccctaaaggatcatgctggaaccccagggcccccgcgcacactcacctgctttcgccagcatggatgctagcagcttgcacacaatggaacccctcttcctcatcttgctctgcttgctgtaggggaagtaggggatgaccccaataatgttcctggcacaggcagtcttcagtgcgtaagccatgatgagcaactccatcacagctgtattcacatctctgaaacagtcaaagtttgtatttggggattaattccatgtatcaaccctagaaaagatcttgactttatcaacttaacatgggctgcccagatgggtgttgtgggaattttaccatcacactagcttacaatggcacctcatgaaggcaggggaagctttctgactttttgtagctgagtaagccctagctttcatctgaggttactcctattcacagcacagttaacccaccctcacatttgcctgggtctcctgtgtcataccccgttactgcagtgacatctgaagcaactgctggtgaccagagttacccaacacctgctggcagcctcccagggatttgggcttaggccagcttgaatgccaagggaaacccaactgcccttccatttagctgccattaacagaaagatttggtctctttccattgagtgtggggaggtcttggaatataattttttttttttttttttgagacggagtctcgctgtcgcccaggttggagtgcagtggcgcgatctcagctcactgcaggctccgccccccgaggttcacgccattctcctgcctc[135 bp omitted]tctgtcgcccaggctggactgcagtggtgtgatctcagttcactgcaacctccgcctcccaggttcaggcaattctcctggctcatcctcccgagtaactgggattataggcgtgcaccaccacacgtggctaattttgtatttttagtagaaacggggtttct[132 bp omitted]gctggacgcagcccagccaatatggtgaaaccttgtctctactaaaaatacaaaaattagccaggtgtggtggcacgtgcctgtagtcccagctactggggaggctgaggcaggagaatctcttgaacctgggaggcagaggttgcagtgagccgagatcatgccactgcactccagcctgggcaacagagtgaggctctgtctcaaaaaacaaaacaaaacaaaacaaacaaaaaaaaacctccctggacctttctttccctgacatataaattcctgacaaagattacccagagagacaaaaaatgaaatatgaatctggaagatattagaaggaaaggcaatttccaatgattataaatttggattgctagcttttgccaaggataatcaaacctaatgtagactctgcattcattcattcattcattcattctttctttcacttactcactcactcacttattaagaaatggtctcaccctgtcacccaggctagagtgcagtggtacaatcttagctcactgcagcctcgaactcccgggctcaagtgatgctcccgcctcagcctatcaaagcactgggattacaggcatgcgccaccattcccagacaggctcttcctttaaaaaggggtgagagccttgaaatccttccaggacctctctcagtattcacttctcacattagcttcctcctgctcttcctggactatccacgcatcctcaaacatccccgtcttggggtgggggtgggggtcaggactgtatctcccttcccttccccacgtcatcagttcctacccatggcagcaggttcttcaggtaccagttcttgaacaattatcagctctacactgacacgtaggtgatgctgccctcattacagcaaagcagaaagcctgccatacacacagcagagttagcgtttgctgaataggtggctgaatgaaatactcagcaagagatgctttctagcttgaagggtaatcgagccatttccttccagtctcttccaatttatgtttacacttctctctaaggcagagtgcatttgggagtgagcgatttcaaagacatccttttattctgacaatgttttccacttccaggttcaattcctggaacttccaatttcacccttgtaatttggatttttcttaactattgcaagcattctatgattaaaaaaaacaaaaacaaaaacaaaaaatgtctccctgaggagactgatgcagggctcaacttcaagacaactaagacattccttttagactgctaatccattccattgttttccagttaccttttattttttctctcaataaattggagcatttttctccttcagacttccaaattaataatgccaagtctggcatcaaaaggtcagataatctttggtagaatcaaagcaattatcaaacactttcaagaaagttgggaattcataatagtcaattttagttcatcatccatgcaacacatatttagggggcaacttgaggcaagcactgtggtaggtaaacaaggcaaaccacctctagagaaagccaaaggccatctgggaccactctcgaggtactcattcttcccaagaaggagcacatctgactcatggaagaatgtgtggtccccttcccagagactcttttgtttaaaagattttttttcttttcttttctgttttgtaagaggcagggtctcactatgttgccatggctggtcttgaactcctgggttcatgcaatcttcccatctcagcctcccaaagtgctgggattacaggcatgagccaccacacccaggctggctgtggcttcataaaccagaacccaatatccacaatatgtttggagtcagttaatttagtagcttctgtaagcgttatctgttcaagtagtgaggttttttttgttttttgttttgttttggagatggaaattcgtttttgtcacccaggctggagtgtaatggtgcgatctcagctcactgcaacctctgcctcctgggttcaagcaattctcctgcctcagcctctcaagtagcggggattacaggcacccaccaccatgcccagctaatttttgtatttttagtagagatggggtttcaccatgttggccaggctggtcttaactcctgacctcaggtgatccaaccgcctcggcctcccaaagtgtgttgggattacaggtgtgagccaccacacccaggctcaagtagtgggtttttagctggctttgtcatagacaatacacaagtggaccaagtgcagtagtttatgcttgtaatcccagcactttgagaggccaaggcaggagtattgcttgaagccaggagtttgataccagcctgggcaacatagcaagacctggtctctaaaaataaaataaaatttaaaaatcagccaggcacggtggtgctcacctgtagtcctagctattcgggaggctgaggtgggaggatccctcaaacccatataatgagctgtgactgcaccactgcactccaacctgggcaacagagtgagaccccatctctcaaaaaacacacaaaaaaataaaaacaaaatcaagtaaaatacacaagtgtatgacaccatgagttttggagaacacagcacaagggaggcccagataataaaacattaatgaacaagataaacaatttttgagaagtcttgatttcagggtaacattcctttcattaataagcaatttctgggccggacgcggtggctcacgccagtaatccgagaggccaagacaggtggatcacctgaggtcaggagttagagaccagcctaaccaacatggtgaaagcccgtctctactaaaaattcaaaacttagccgggcatggttgcaggtgcctgtaatcccagctacttgggaggctgaggcagaagaattgcttgaacctgggaggcagaggttgtagtgagccgacatcataccactgcactccagcttgggctacag[132 bp omitted]aaacccccgtctcaactaaaaatacaaaattagccaggcatggtggtgcatgcctgtaatcccagttactcaggaggctgaggcaggagaatagcttgaacctgggaggtggaggttgtggtgagccgagatcatgccattgcactccagcctgggcaacaagagtgaaactccatctcaaaaaaaaaaaaaaaaaaaaaaaaagagcaatttcccatgaggtttttattttccatttttccaagggattcaacatcctccagcccaacgctaaagaaagctccatacctcaccccttattggtcagaaaggtgacaaaaggggctttgtcacattggctttacccattcactgagagataccggacaaattggacaccaggcagttactttgtgaactagcagggcgaagggaaatcggctggcagtctctgctttatctgttccctaagaatgttgcaagtacaccctggctagctcttgtagtctttatctctaagtaggacattcttaattgttttaccaactacttttctttcttttttttaaatagagaaaggtctcaccatgttgcccagctggtcttgtactcctgggctcaggcaatcctcccgccttggcctcccaaagtgctgggagtacagcttgagccatcatgcccagacaaccaactacttttctttcccctaagaaaaccacatcctatattaagtccagcccttactgctctagcattttggacaggcaaaaactaacctgaggtgtgctctcttcagcagcacatatactaaaattggaatgatacagagaagattagcatggcccctgtgcaaggatgacacgcaaattcgtgaagtgttccatattggaaaacaacaacaacaacaacaacaacaaactaacctgagatgaggaaacaggcatggtatacgcattcattaaactagccaggctcgcaaaaagagaaaccacaccacagctggaagtaatgggggagaatttaccctgctcccaactgtaacaattaatcatctgcagcagctgggaattttttgttgttgttttgagactgagtcactctgtcacccaggctggaaggcgagagtgcagtagcaccatcttggctcactgcaacctctgccttccgggttcaatcgattctcccacctc[211 bp omitted]tttacatcaacacactagaacttgtacataaacataaaaattaacctttaaaatatacttcataagcttcatattttacttagttccattgcttggtatatctggaaaatctctgagtatcgcacagttcaattacccaaaataatcattttgttctgaatggctttttgccatttccaaaaattaaacctatcctcaacgaccaaaaggttgctattattagaacagtcaaaagaaatatgctgcaagtttggaagcagtagttccaaagctattccaagcaaaaacagcaccaaaaaaaggtatctatgtgattttagaacaacagctctgaaggcaactaagcttattttaatgtctaagctttggtctgtttgcctaaaattagccttattactttaggcaatgcccccttcctcccaacaacagaaaaacctgtaaaagatattccttcatctatgtaaccgcagataatattaaaaaaccaggtcgggcacagtggctcatgcctgtaatcctaacattctgggaggctgaggcaggtgaatcacctaaggtcaggagttcgagaccagcctaggcaacatggagaaaccccatctctactaaaaatacaaaaattagctgggtgtggtggtgtgcacctgtaatcccagctactcaggaagctgagacaggagaattgcttgaacccaggaggcagaagttgcagtaagccgagattgtgccactgcactccaacctgggcaacacagcaagactccgtctcaaaaaataaataaaataaaatataaaatataaaataaaataaaaaattaggccaggcatggtggctcatgcctgtaatcccaggactttgggaggccgaggtggatggatcacctgaggtcaggggttcaaaaccagcctggccaacatggtaaaaccccatctctactaaaaatacaaaattagccaggcatggtggtacatgccagtaatcccagctactcgggaggctcaggcaggagaatcacttgaacctggaaagtggaggttgcagtgagccaaggtcacaccactgcactccagcctgggcaacaagaaagaaactcgtctcaaaaaaaaaattaaattaaattaaattatctgtgttctttagttggtactaaagtatccagtactcaagcactacaaaaactagtttattgactgggcacggtggctcacgtctataatctcagcactttgggaggccaag[132 bp omitted]gaggcaggagaattgcttgaacctgggaggcagaggttgcagtgagccgagatcacgccactgcactccagcctgggcaacacagcaagcctccgtctcaaaaaaacaacaaaaagaaccagtttattgtgacaaacctaataaccttctttatgggctgcacacccacacaaaacaacacatccaacctgtcttttttccaaatttttcctttcttcttccatccctatcagcttaagagacagagaaaatgccaggtgatgatatttttgctttgatgctcttaaactgaaccactgggaagagacttgcggcttttatctcaacaccaaatacacataaagaaacttcaccatcttcaggagagggttctggttttcagaagtacccatttatacctatgtgcctttttcaacagggaaggtgcctttccatgttgacttatgtaaaattgtcattgttattgtacaagactctgctacaactctatgaagtgcttcctacttcttcctttggccaaaatttcttttttcttttaaataaaagctgggcacagtgcctcatgcatgtaatccaagcacctcgggaggccggggcaagcagatcagctgagctcaggagttcaagaccagcctgggcaacatggcaaaaccctgtctctactaaaaatacaaaattagccatgcatggtggcatgtgcctgtagccccagctacttgggagggtaagacggtgggtgctgagacaggagaatcacttgagcctgggaggtggaggctgcagtgagccgagatcgtgccactgcactccagcctgtgtgacagagcaaggccttgtctcaaaaaaaaaaaaaaaaaaagaatagagacagggtcttagtatattgcccaggctggtcttgaactcctggcctcaagtgatcctctcaccttggtctcccaaagtactaggattaaaggcatgagccaccacacctgaccatggtccaatttcctaatactcaagatacaagtgagaaaaacggtaagtgtttcccaattggctattaactaagtcatttcttcatgcttcttttgtcccttccctggaagacacttgcacactgatgatcctttgtttgtcaagttcagtctttactacccccagcatcactctagattgcacgtgttaaatacttatattgagcactcttggttaccatgtgatatcaaagccaagaattttataaaattcaacttcgtatcacaaaggacactaacaatatgctgtttctatgctcgactagtttgaaataaccatgaacggcctcgcacggtggctcgcgcctgtaatgccagcactttgggaggccgaggcgggcagatcacttgaggttgggagttcgagaccagcctgaccaacatggagaaaccccgtcactactaaaaatacaaaattagccgggcgtagtggcacatgcctgtagtcccagctactcgggaggctgaggcaggagaattgcttgaacctgggaggcgggggttgtggtggggtttgcagtgaaccgagatcgcgccattgcactccagcctgggcaacaagaacgaaactccatctcaaaaaaaaaaaaaagcggggggtagggggggactgtctttcacaaaactggtccctggtgccaaaaaggttggagactgctggactatctaacaaaatggggtctctgccgtgagaaggttataacgtcttagctcctcccctgactcatagatgatccctaaatacatgtaacaaaacaaagatgccaagagcacagctgctcatgtgccagaggagaactgctctgatcatgcaccaactcagttcagtcttttcctggagaagtccaactcaaattccagattacaatgcagaccaacgaattagtgttaacaatttgacttttttttgtttttttttttttttttttttgagataagatctggctctgttgcccaggttagagtagagtggtgtaatcacagctcactgtagcctcgaccacccaggctcaagcaatcctcccaactcaaccacccgagtagctcagactacaggtgcacaccaccacgcctggctaattttcaaattttatttgtagagatggagtctcactatgttgcccaggctgttcccaagccatcttggactcaagtgatcctcctgccttggtgtctcaaagtcctgggattacaggtgtgagtcactgtacctggccaacaagatttcttaaagataactctttacatgacaaattctttcgttatcacaaattcaattagggtagtaaagagacttcaccaatcaatcatgcttttagaattagaccccaatggctgggcaccgtggctcacgcctataatcccagcactttgggaggc[135 bp omitted]gaggcaggagaatggcgtgaactcgggaggcggagcttgcagtgagccaagattgcgccactgcaccccagcctgggcgacagagtgagactccgtctaaaaataaaagatggagagtcaaacaaaaccaccaggcaaaaaagactccagtcaccaggaggcaaacaatacaaaaccaaaactgttggagaaaatgtgaattagtatatcctcaatgagggcaacgcagccccttccctcaataccacagggcatggaccctcacaaccagaaatttcttaggatcttcctacagatacacctgaaacaccgacaatatgatgtatatacgatgaggctcacagcagcctctattgtatcagcataagactagaaacaaactgacacacaagagactgaataaaccgatgcatccacacaagatgtcatgaagcagcaggaagacaagacaacaggaacacagcttccttccgaggtacctgaatctcatcatagtgaaagagccatcacggtgaaacccaaattgagggacattcgacaaagtaatcggcaaaatgtcagtcttcaaatgtgtcaaagttttcaaagtcaaggccgggtgtggtggttcatgtctgtaatcccagcactttgggaggctgaggcgggtggatcacttcttagtccaggagttcaagaccagcctgggcaacatggcaaaacctcatctctactaaaaatacaaaaaattagcccaggatggtggcacacacctatggtcccagctactaaggaggctgaggtgggaggatcgctttgagttcaggagcttaaggctgcagtgagccatgatcgtgtcactgcattcctgcatgagtgacacagcaagaccctgtctcaaattaaaaaaaaaaaaaaagaaagtcaaataaaggccatgaggaactgctccaaactaaagaagactgaatagggccgggcgcagtggctcacgcctataatcccagccagcactttaggaggctgaggcaggcggatcacttgaggccaggagttcaagaccagcctggccaacatggtaaaaccccatcactactaaaaatacaaaaaaattacccgggcatggtggcaggcacctgtaatcccagatactcgggaggctgaggtagaatcacttgaacccgggaggtggaggctgcagtgagccaagatcacaccactgcactccagcctgggcaacagagtgagactccgtctcaaaaaaccaaaacaaacaaaaacgaaacatataaagcatccagcacactggtagcactcagtgccattcttattactaatatggtctggggaatgtacactgatcaggacatgaaggtctggatttttcagagacacagatggtgtaatggcccactccctgtcaggcgatgagaaaggagatagtcccatagaagcatgaacgttctcactcaagcaggccaggattccccaggtgtcagccccctgccctgagggaagcaagggcgacgatctctgaaacagagataggctagaaacaggccacggtgcaagataaaatgcagtgcaaaaacctctcttgatgggtatgaaccaggagcagtttatgcaccacacgtaacaactagaagcttttcagcagagctgagctgacggacactggcctggggtcagtgcaaaccatgggaaaaccctttgtccttgaggagtttaaagcttggggagtggtggctcacgcctgaaatcccaaaactttgggaggctgaggtgcatggatcacttgaggtcaggagttcaagaccagcctggccaacatagtgaaaccctgtctctactaaaaatacaaaaattaactgggcatggtggtgggcacctgtaatcccacctactagggaggctgaggcaggagaatcacttgaacccaggaggtagaggctgcagtgagccaagactgtgccactgcactccagccggggtgacagagtgagactgtccccaaaaaaagcctggagagaagtaaacaggtaacagtacagtgtgacaaatggtaggaattccagaagacagtaattgtatttggggaagcatttagtttaacatgcaaacgaatgtataacttttttttttctttggtgagacagtctcactctgtcgcccaggctagagtgcagtggcgcgatctcagctcacctctgcctcctgggttcaagcacttctcctgccttagcctctcaaacagctggactacaggcgcatgccaccatgcccagctaacttttgttttttattcatttattttgtttttttttgagatggagtcttgctctgtagcccaggctggagtgcagtggcgcgatctcggctcactgcaagctctgcctcctgggttcacgcctttctcctatctcagcctcctaagtagctgggactataggtgcccgccacca[183 bp omitted]atattggtcaggctggtctcgaactcctgacctcgtgatccgcccacctcggcctcccaaagtgttggcataacaggcgtgagccacacgcccggcctgaatatataacttttaaaaacactaagttgttgttcatatgaaaagataatcaattatattgttaaggtttttacagaaaagagataaagtagtcagtcctcttacctgggtattgtctgtataatgaaaatatcttggccacgaacagattcttttatttcaactcttgtttctgaaaaataaaaatgttctgaagttttaagaaaagctcctatgttaaaaaggagaaaaaagaaaaacaaaagtacttcatgccgggcgcggtggcacatgcctgtaatcctagcactttaggagggctgaggaaagcagatcacttgagcaccagagttcaagaacagcctag[187 bp omitted]gtggcgggtgcctgtagtcccagctactcgggaggctgaggcaggagaatggcgtgaacctgggaggcagagcttgcagtgagccgagatcgcgccactgcactccagcctgggtgacagagcaagattccgtctcattaaaaaaaaaaaaaaaaaagagttcttcgagaccagcccggccaatatggtgaaaccctgtctctactaaaaatacaaaaattagccaggcatggtggcgcacaactataatcccagctactcaggaggctgaggcagaagaatcacttgaacctgggaggcagagcttgcagtgagccgtgatcgcgccactgcactccagtctgggtgacacagcgagattctatctcaaaaaaataattagctggacatggtgacaagtgcctgtagtcccagtgggaggatcacctgagccagggaaggtcatggctgcagtgtgagctgaaactgtgccactgcacttcagcctggacaacagagaccttgtctggagaaaaaaaaaaaaaaaaagcagaaaagcaaagcactcatgatgcaacagctagaaacatttggagggagtaaagattaatctaaaccaacattttatctggggcaaaagaataagtcttggagcagtatgaagaagaggaagcgagaatgacccccgactgagcgcagtccgtgcaccgccactgcatcccgctcccagtgcctacgtccggctgctttcgttgccaccatgcccaagagaaaggctgaaggggatgctaagggagatgaggccaaggtgaaagacgaaccacagagaagatctgtgaggctgtctgctaaacctgctcctccctccaaagccagagcccaggcctaaaaaggccactgcaaagaagggagagaaggtacccaagggaaaaaggaaaaagctgacactggcgaggaggggaatgactctatgggaagtggagatgcctgaacacaccaggcacctgctggagatgctgagggaagcgtgtgcattttggataactgtgtacttctggtgactgtacagtttgaaatactattttttatcaagttttataaaaacgcagaatttttgttttctaagctatgttgttagcacacagaacgcttcattgttgttctggggaaaggagcatatgtcatgaatagaatgtctccgaagctggattgatgtggggaaagcacctttcccttctagttttgagagacttcctctcggctcccaggaagaggggctccctgactttgacacacatggccacctcagcacacaaaagccttgtgctctgaaaagacaaatttgtttctatgtcctcttctccctttccacctttcagcatggacttaaatcccttaaagccagacatctgttggcacctgacccccccataattgattaccagtgtggcaggcaatctggaccttccagtgatgccactgagatggcgcccctcaaaagagcagtagttccgtttctagactgtggatcttcagataaactctgccatattcatttcacttccggaaagtcagggtcagcttgtgaaaagttgttaaacaacatgctaaatgttcactgggttttacagtggctttctgatttttggttgtgcactgaaaaagggagtttggccgggcgcggtggctccgcctgtaatcccagcactttgggaggctgaggcaggagaattgctcgaacctgggaggcagaggctgcagtaagctgagattgcaccactgcactccagcccgggcgacatccttattattttttcaacaaatgctgaagcctcctccatgtcaggaactgtactgggaaccccaaaatgcaggacttggaagaagggacaaagactgacccaggagagatgatacaacaacaaggccagcaaaccctccgggcccaatatgccagagacgctagccatgacgaaggagaaagaacaatggggctggaaaaaagggcctcactgcaatccagaacgagcagcgcagaagggggtttgggaacatgggaagatgtgggatccgagtgtgccaagcagaggggcaggcagttagtccacttagaaagcagacagagtgggccgggcgcggtggctcatgcctgtaatcccaacactttgggaggccaagacgggtggatcacctgaggtcaggagttcaagaccagcctgaccaacatggcaaaacccccgtctctgctaaaaatacaaaattagccgggtttggtggcgtatgcctgtaatcccagctacttgggaggctgaggcaagaggattgcttgaacctgggaggtggaggttgcagtgagccaagatcatgccactgcactccagcctgggtgacagagcaagactccgtcaaaaaaaaaaaaaaaaaaaaaaaaaaaagaaagcagacagagtgaggggaaagagagagacaggaggtcagggagccaaggggccaggacttgcaggactctggatttcatttcttactcgctgaagagtctggaatttattctagcagtgacaggaaagccactggaagatttaaggttgggaagggtttcatctacttgttttaaaaagactgctggctactgtgtgaagaaaaccgtggcagggcaggagtggccacggggaggccatggcgtctgttttggaaggtgtctagcaagcagcaaacggcaggctggacttaagtgggagcagcagaggttgtgagaaagggtcagatataagatgtattccaaagtcagagcacacaagatgtggtaatgggtggatcaaagatgaggcaggtaaaggggtagaatctggattcccaaagggccccatgtgattgctaaaaagactggaccccagcctacagggtaggagtaaggaagc[138 bp omitted]caacatagtgagaccccatcttaataaaaataaataaataaataaataaataaataaaggctgggcacagtggtcatgcctgtaatcctagcactttgggaggccgaggcaatagggtcccctgaggtcaggagtttgagaccagcctggccaacagggtgaaaccccatctctactaaaaatacaaaaattagccgggtgtggtggcgggcgtctgtaatcccagctactcagcaggctgaggcaggagaattgcttgaacctgggaggcagaggttgcagtgagccaagatcatgccactgcactccagcctgggcgacagagtgaggctctgtctcaaaaaaactaaataaataaaaaataattttaaaaaaaagaaataattttaacttacctccattggtctcttgatatacaacagacttccccaattcagcaccaaggcgcctatagatcaaaaagaacaaaaaagggaaattaagattactctttttaaaaaaattccagttcatatgcatatgtctaataaaaagactcaaataattaagctgccattctttccaaaaaataattcagaaaatctaattcattaaactaaaattctgctgtcactccataagcagctcaccacgttgtaacatactgctttaccagacagagctcacaacccatggttaatgtctggtgcgcgttgttctttgaatagtaattttcttggaaaatcacttccaaatacttggttacaagcaatgatttcaataacacacaccagagataaatgcctcaattatcaaaagcatagagaaggaaagaggcttcagcactctgaccaaatgtggtgtggatcttgtttggatcctaattagaataaaccaagtgtaaaaagccatttttggccaggcgtggtggctgatgcctgtaatcccagcactttgggaggccaaggcgggcggatcacctgaggtcgggagtttgagaccagcctgaccaacatggagaaaccccgtctaaaatacaaaatcagctgggcatggtggagcatgcctgtaatctcagctactagggaggctgaggcaggagaattgcttgaacccgggaggcggaggttgtggtgagccgagatcgcgccattgcactcccgcctgggtaacaagagcaaaactccgtctcaaaaaaaaaaaaagccattttaaaaaataatcagagaaatatggacaaagactagatactacataatattaaggaattaatagtagtgtgaggttttaagtcctgattagtaagcattactctttttacaagtgaaatgatatgatgtaagataatctatttaaaaatattccaggccgggtgcggtggctcacgtctgcaatcccagcactttgggaagctgaggtgggcggatcacctgaggtcaggagttcgagaccagcctaactaatataataaaaccccatctctactaaaaatacaaaaattagctgggtgtggtggcgagcgtctataatcccagctactcaggaggctgagacaggagaattgccagaatccaggaggcagaggttgccgtgagccgagatcacaccatcgcactccagcctcggcaacaggagcgaaactccatctcaaaaaataataataaaaaaaataaaattaacatctccagccaggccaggcgcagtggttcatgcttgtaatctcagcattttgggaggccaaggtgggcagaacacttgaggccaggagttcgagacccgcctgggcaacatggaaaaaccccatctctactaaaaacacaaaaattagctgggtgtggtggtgggcacctgtaatcccagttacttgggagctgaggcacgagaatcacttgaacctgggaggcgggggctgcagtgagccaagattgtgccactgcactccagcctgggtgactttatctcaaaaaaaaaaaacaacaaaactccagccaggtatacacatacaatggaatatt[136 bp omitted]cccatctctactaaaaatacaaaaaattagccgggcgtggtggagggcgcctgtagtcccagctactcgggaggctgaggcaggggaatggcgtgaacccagggggcggagcttacagtgagcagagatcgtgccactgcactccagcctgtgcgacagagtgagattccgtctcaaaaaaaaaaaaagaataaattctggtacgtgctatgacatgagggagccttggacaaggtatgctgaggaaaataagccagacacagacaaacgctatgattctatttgtatgaagtcccaagaataggcaattcatagagacaaagtagaatggaggctaccagggaatggggacttagtatttaatgggtacagagtttctgtttgggatgatgaaaagttctggaaatgaatagtggtgatggttgtgcaacactgtgaatgtagttaaagccactgaagtgtacacttaaaaatggttaaaaaggtaggccaggcacagtggctcatgcctgtaaaggcggcacttcgggaggccaaggtaggtggatcacctgaagttgggagtttgagaccagcctgaccaacatggagaaaccccgtctctactaaaaacacaaaattagcggggtgtggtggtgcagcctgtaatcccagctacttgggaggctgaggcaggagaatcacttgaactcgggaggcggaggttgtgggtgagccaagatggctctattgcactccagcctgggcaacaagagcaaaacttcgtctcaaaaacaaacaaacaaacaaaaaacggttaaaaaggtaaactttatgttatgtatataacaatttttaaaaatactccaggtgggccgggcgcagtagctcacgcctataatcccagatcgtctgaggtcaggagtttgagaccagcctggccaacgtgg[146 bp omitted]acccgtctctactaaaaatacaaaaaattagctgtgcgaggtggcgggggcctgtagtcccagctactcggaaggc[134 bp omitted]tggtgtcgggcatctgtgatcccagctactttcgaggctgaggcaggagaatcgcttgaacttgggacgtggaggttgcagtaagccgagatggcaccactgcactccagcctgggtgacacaagactgtctcaaaataaataaaacagataagataaaacaaaatcttactgagcgacaagtaaaacaggtaagggaagtatttatgaatatgtatcatttatagtaattcaaaatctttcgggaatttgccaggaaagaatctaaaacaaacaaacaaaaaaaaccctcactgacttttaaaatgtgccctgctcccctctgctctccctcaaggtcaggtagggtaaatctgaaccactagatacacacagaagcttcgtttaaagtcagtgttttcgttggcctcagaaagaaagacaaacaatcaggggttagaaatagaaactaggtagtagactgcaaaaggattgatttgtttttttaacattcttccactctccaaaactccaactattaaaaaaaaaaacaagcagagctgaaaaaaaaatgactaaagttttccctttcttctacatttccccccagaagtttaagatatatccctgcaatcatttgtcaaccctaaaaaagtaacgaagtaactctatgaaaactgtttaaaatgtgaaaatggctttaaatattaaaagacgagctattcattttatgtcttagatttctaacaagtgtatgtagaaagggcatataaggctcctcctttatatcagagctctgggattctc[136 bp omitted]ccagtctctactaaaaatacaaaaaatgagccgggtgtggtggcgggtgcctgtagtcccagctacttgggaggctggggcaggacaatggcgtgaacccgggaggcggagcttgcagtgagccgagatctcgccactgcactccagcctgggtgacagagcgagactccgtctcaaaaaaaaaaaaaaaaaaaaaaagaaaagaaaaagaaaaagaaaagaggccacttagtaaacaactattcagagggccactatgagcccctactctgctagaaccagatactacttctacattatcccgatcatacaatattctcaaccatgcccatttcacagatgaggttcagggaaatcaagtctcttgcccactgacacagagctagtaagtggcaaggctgggagggcatctcagagctgtcagaccccaaaggcgacttaagaccaggggcttggttgggttaaagacacaaatgactgatcttatcccaagctgatttacaaagcagggtcaggcctgtcatttctaccaccagctccggcccatctgcctccctggaattgccttcttcgcactgccagtccccacacctttgctctgcgaccgcacctgccgcgtcggatcccccaactcacaaccacgcccgcgggtctcactgcagtgagacttgagagtggcggcggtcagattcccaggtcaactccagccgtgggaaaggaagccaagccctgagcccctttccccaagacacgcactccggggctccagaaagctcggcccgccccggggtgtgggactgcggagacgaaaggcaggcaggccgcggacccagtcacggggcggggggctgaggtcaccgagagtccgccccaagcctcccagctgcaaaaccggggagcggggggcggtatccgtcacctccaagctttgtccggctgggaaggcccgcgcctcccgccccaggtgcaggaggtggggcgggtggaggggagcgggtccctccgggcgcgaaggagagctaggcgccgccgcccccggcccggccctcccaccgcccccttactctgtgatgcgcttggccagctccgtgcaggcggccgtggagttggccgagaagactcggtagccggtgcgagcggcgttcatggccggcgggggaacggggcgggcgcgcgggacgcggaaagccgaggacgcggagggcgggggcaacagcagcagcttcttgggcatcgtccggcccgcggcgcggttacgaccggccccgcgcggggctgcactctgagtgcttccgactgcgagaccccggtttgggtggggaaggcgctgagaaactcggcgcaagcggggagagctccgaggtccgtgcccttgcgcaccccacaccactgactacagcggccgagccttcgcagcgcccggcgccgccgcctcagagccagaggcaaggccaccgccccctccgggcatccgaagagcgtcggctagagcgccctcaggccgccatctcggatgagggcagggagcctggcgactctctaaaagcctgttcttccgaggggcatgtcacaggttcgccccgcccctgctttgaccgcttccacgggagctctttcggtctcactttcttgggaggagcagcctacctcggtagtggccccaggtgtttccaactttttggccaggacccaacatgtccgcctccgaggaggtatacgatctagctctgcatgtctatggtagcacagcgcccgccccacgaggcgcgtgcgccggccggagattaatttgaaaagtagagggcgggggttctttccagctggttgaccgcagtactgaagcggccaaaaagtggtcttctcctgagcctgatctttcaggcgtttccgaacagatccccaaccctgtgtctgcgtgtaaggcaaggttccctgaacgtgccaaaggccctcttgccggtattcgctttcaatcaaaaaagccctccttctcctctttccatatgcgccacccctccgagacccactcgcgatgcgtctgttccacagtctttctggtgacctcaaccacagtaagccgcccggcccgcgggactgtgccacacgtagatgcttgcattttttaaatttttgttgttgttgttattgttttgatgcttgcatatttatgtacctttgcaaacatctattttcctaactaggatgtaacccattttacggccacatcgtgagttccttttttttttttttaattttattattatttatttattttttgaaatagggtctccctctgccgcccaggctggagtgcagtggcgcgatcacggctcactgcagcctctacctcccgggctcaagccatcctcctacctcagtcattcaaaatgccgacattacaggcctcagccatcacgccccgccaagatcgtgtattcctgagtgctccgtgttacccagtgtatagggcagtgtgtgggctccagaggcccgcaatcagtacttgttgaagtagaaagtaaagcccagggaagcatttgagatctctagttatcagctgcaccagaactcgaggggaggagaggtgcctctcacattgacagtaccatcttctgagaatgtcctttagagactctgcttgtggtgacattgggcttgagggagcagtagattgtgactcagcatgtcgtgaaggaccacaagtctgaagctacaggatttggaagttgagctgccctgagcctgcagcagcctggcccctattccaatagctctctagaaaaaaaaaaaaaaaaaaaaaggacagtgggtgcacagcctaggccaaattatttaaccactgcacacatgtccagctcacagaccctgacaaaaacc[135 bp omitted]acccaatctgtactaaaaatacaaaaattagccaggtgttggctgagcgtggtggctcactcctttaatcccagcactttgggaggctgaggtgggtggatcacctgaggtcaggagtttgagacaagcctggccaaggtggcaaaacactgtctctactaaaaatgcaaaaattaggctgggcacggtggctcatgcctgtaatcccagcactttgggaggctatggtgggtggatcacgaggtcaggaattcgataccagcctggccaacatggtg[133 bp omitted]ctaacacggtgaaaccccatctctactaaaaatacaaaaaattagccgggcgcagtggcgggcgcctgtagtcccagctactcgggaggctgaggcaggagaatggcgtgaacccgggaggcggagcttgcagtgagctgacattgtgccactgaactccagcctggacgaccgggcgagggcgcgactctgtctcaaaaaaaaaaaaaaaaaatcagccagatgtggtggcgcggtggcacacacctgtaatcccacctactcaagaggctgaggcaggagaaccgcttgagctcgggaggcggaggttgcagtgagctgagatcaggccactgcactccatcctgggcaacacagcaagactccatctctctctcatacacacacacacacacacacacacacacacacacacaattagccaggtgtggtggcaggcaactgtaatcccagttacttgggaggctaaggcaggagaatcgcttgaacctgggaggcggaggttgtagtgagccgagattgtgccagcctgggcaacagagtgagacctcctctcaaaaaaaaaaaaaaaaaaaaaaaacaggttgggcacggtggctcacgcctgcaatcccagcactttgggtggccgaggtgggcagatcacgaggtcaggagattgagaccatcctggtcaacatgcttaaaccccatctctactaaaaatacaaaaattagccgggggtggtggcgcgcctgtggtcccagctactcgggaggctggggcaggagaatcacttgaacccaggaggtggagatttcagtgagccaagatcaagccactgcactccagcctggcaacagagcgagactccatctcaaaaaaaaaaaattagccagatgtggtggcacatgcctgtagtcccttctactccggaggctgaggcagaagaatcacttgaatccaggaggcagaggttgcagtgagccgagatcgtgccactgcactctagcctgggcaacagagtgagtctctgtctcaataacaacaataaaaagttaatcagcctatagccccagctacttgggaggatgaggcaggaggatcccttgagcccggaagtccaaggctgcagtgagctacgattgagccactccactccagcatgggcaacagagaaagactctgactcaaaaaaattaaaaataaatgcttgctgaaaaggggagcacgaaacacttctgaggcaggagaatagggtctggaggcagggtacgtaaggccaattcacgctgacttcttagaacgaaataaaatggaaatacttcagctatgacaagaaatatcctctccatttacatagggcatacaggaaataatcctatttacatagggcatacactgagtgaatgactttgtaacttgacttcattcccttcatttacatagggcgtgcaccaggtaaccaatggaaacctctagagggtactgaaaccccagaaaattctgtaacggggctcttgagcccctatgctcggcatactcccaccctgtggggtgtactttcattttcaataaatctctgcttttgttgcctcattctttccttgctttgtttgtgcgttttgtctaattctttgttcaagatgccaagaacgtggacaccctccaccggtaacacttccgggatcccactcctcagcacaagcatgggctttgcaacaatgtggggatgcccagggtggccaatggtcattgttatggactgaaagtttgtgtcctcccaaaattaatatgttgaagttctaacccccagtgtgatgggactaggaggtggaatgtttggaggtgagctggagttagatgagggtggggaccccatgatgggattagtgcccctaaaggaggaagagacatcagggcttctcctctctctgccatgtaagaacatagggagaaggtggccgtctgcagcctagaagagagccctcaccagaacccgaccatgtggctccctgagctgggacttccagcctctaggactgtgagaagtaagtgtctgttttttaagccacccagtctattttgtagcagcccagacagactaaagcaggcatgctgagcctgcctagggtgtcacgcatcccgtctgacacgtaggcctgccatggtctggcttgctttctcccatgtcctcctcagaagaggttgatgctcaaagccctctgcaatgcttgtgacccacgtttcccctgcagtcccccctcccacagaagcattgcaggggtctgtgtacctgaggagggaagtgaagggacagaaacagctcattgctcaatgcccaaagatagcacgttgggcctcaggagcacctactcaatttagccactaaaaaattagaaacaaccgaaatgcccccaaataacagaatagctatacaaatgatgatgcctccgaatgatggaatatttggcaaccatcagaaagtttgctttttaggagctgggtgtggtggcccacacctgtggtcccagctactcagaaggctaaggcaggaggatcccttgagcccaggagttcaaggctcacaaatgtgaacagccactgcactccagcctggacagcatcataaaactctatcactttaaaaaaaaaaaaaaaaaaaaaaaaggctggagctgggcacggtggctcacgcctctaatcccagcaccttgagaggccagggtgggcagatcacacggtcaggagttcgagaccagcctggccaacatagtgaaaccctgtctctactaaaaatacaaaaaagtagctgggcgtggtggtgggcgcctgtaatcccagctactcgggaggctgaggcaggagaatggcttgaacccagaggtggaggttgcagcgagccaagatcacgccattgcactccagcctgcgcgacagagcgagactccatctcaaaatcaatcaagcaatcaatcaattaatcaaacaaggctgggcatggtggctcatgcctgtaatctcagcattttgggcggccgaggctagtggattacctgaggtcaggagtttgagaccagcctggccaacatggcaaaacccatctctactaaaaataacaaaaattagccaggtgtggtagcaggcacctgtaatctcagttactcaggaggctgaggtaggagaatcgctttaacctgggaggtggaggttgcagtgagccgagattgcgccactgcactctagcttgggccacagagcgagaccctgtctctaaataaataaataataaattaaaattaaaaaaaaaacgtttgctttgtctggcacaatggctcacgcctacaatcccagcacttcgggaggccaaggcaggtggatcacctgagatcaggagttcaaggccagcctggccaacatggcgaaaccacatctctactaaaaatacaaaaattaaccagatgtggtgaggagcacctcggatcccagctactcgggaggctgaggcatgagaatcacttaaacccgggaggtggaggttgcagtgagccaagaccacaccattgcactccagcctgggtgacagagcaagactgtctcaaacgaaaaaaaaaaggtttgcttttaaaagaatcattgatgatggggaaatgctcataaacaaagtggcaaaataacctgacttagacattatctgagtcatattttcctgcatgtcttaagagaaagaaggcgcacagggacgtgtttgaggacctgagactcccttaagaggcttttattatttttatttatttattttttaagagacagggtctcactatgttacccaggctggactcaaactcctgggttcaaatgacgctcccgagcagctggaattgaggcttttattattgaaagcctaaattcccaaaggcaagaactgaagtgtccctgagtgccccagccttggagagggggagtcctcacaaattgaagggacagttggacgaggaggtggggactccaacaagtaccctggggactctcataaagatgaggaaagaatgaagaccggaggctctccttgaagctcaggaactgcggaaggccctggggctcttttatgtaccagtcctggcagaggacttggagtcagatttaatcttgttaaacagaatttgtggcccagcatggtggctcacgcctgtaattccagcactttgggaggccgaggtgggaggatcacctgaggtcaggagttcgagaccagcctgaccaacatggtgaaagcctgtctctactaaaaatacaaaaattagctgggtgttgtggcatccgcctatattcgcagctgctagtgaggctagggcaggagaatcgcttgaatccgggaggctgaggttgcagtgagccgagatcgccccattgcactccagcctgggcaacagagtgagactctgtctcaaaacaaaaaagagagagagactctctgaaataaagcaacgtttatttgggatcgggcatgacaatgggaatatgtgtgccatagtaaactatgtgtgtatccaactaggtaaaggaggacgaacgtttttagaggaagattgagggggattacacaattgttttgggataattttccttggctacaaggatcaacaacaagtgtgacccagtgccaggttgtacaggcagttgctgggcagatgccctcgcagaagtattttttgtgtaaggtttcagtggcctttgtgcaaggttgtgatttttgctgagtcttccgtgatagtttttgttatctggcatttatgcataagaaccttctctttatagcctttcccagctctatttgtcagagctttttgttttgttttaacacaagtgactcaattttgcttctgacaacttccacagagtcttcatttttactgatgggtcagggatttttttctttctttctttcttttttttttgagactgagtcttgctctgtcacccaggctggagtgcagtggcacaatctcggctcactgcaagttccgcctcccgggttcacgccattctcctgcctc[212 bp omitted]ctcttgtcacccaggctggagtgcaacggcacaatctcggctcaccacaacctccgcctcctgggttcaagcaattatcctgcctcagcctcccaagtagctgggattacaggcatgcgccaccacgcctgggtaatttttgtatttttagtagagatgggg[148 bp omitted]ccagttttgttttttttaccgtttctctttataagaccagactgactcttgaggttccagaccagctggatacctcctgccagaacgaagacagctgtgcctccacaaaatgacattttgcatctacaaccctatttcagttttcaagttttaaaaaatgagctgcttgttaaccgggccagtttcggcatgaattatagaaagatctcctctgtactagaaactagaagacaaagggtggcataagtagagatttggcatgaaatattgtccaggaacaaacaggacaagacaaagaggggtgtgtttaggattgctcagccctgtccccaagggaggaactaattggaagacaaggtcagtctttgcaaggataaagaacatttcaggcaataattcagaagttttgcatccacgttgcgccactccaacttgaactttggaaaaatatgaggcctttccctgttttcattctccaaacaagcctcagcaagctgggactgagtgatctttatttctaaaaataataccaacttggatctctaagctgattctctctatagggtaccagaaaccatgctgggggcaggagcaaaatacaggcagacagagccaagcctgctaggagtgacccttcccagcttcagcaaggacagtggtaggcagcagctgctgggctggtctctggaaaatctgaaatggaatcacaaggcactgagtcctcgacctcacctatgcctcggtttcagtagctcttggtgggagtctttggaggcatttgagggggtctgaaatgcccgaacatcattgaagactttggttcaagtggaaaccctcaaggggcttctagtgccttctctctgtgcaccgcagaagctcctgccaaatgacatgcttccttgcccctatggccggattcatagctgcactggcaagatggggtggaagagacagaaacggagcaaggaaaaaggccagggctgtaggggctgagaaggcaggaggcaaacactaaggagacattataacaactcaggaggcaaatgattcaggaagtcacaaggttcttggctcaactgtgccaaatttgtcagttcaagagggtccaggtctatgagagctaaaaacccccaaacaatgcaaatgtccaaaggcagctatgggccggccatggaggctcacatttataatcccagcctcccttgggaggccaaggcgggaggatcacctgaggtcaggagtttgagaccagcctggccaacatggtgaaacccatctctactaaaaatacaaaaaactagctgggcatggtggcagatgcctgcaattccagctactcaggaggctgaggcaggagaattgcttgaagctgggaggcagaggttgcagcgagctgagatggcgccactgtactccagcctgggcaacaagag[138 bp omitted]tggtgaaaccctatctctacaaaaaacacaaaagttagctgggcatggtggttcatgtctgtattcccagctaattgggaagctgaggtgggaggatcccttgagcccaggaggttgaggatgcagtgagctgtgagaccctgtctcttaaaaaaaaaaaaaaaaaaaaggcaatcaaagtgagacaggagaataggatctggaagcagggactctaaggacttcctagaactgaatcaaatggaaacacttcaactatgacaggaaatatcctctccatttacatagggcgtacaccgagtgaatgactttgtaactttacttcatcccttcatttacatagggcgtacaccaagtaaccaatggaaacttctagagggtatttaaacccccaaaaattagcccctatgctcaggctgctctcaccctgtggagtgtacttttgttttgttttttcttttttttttgagacagagtcttgccctgtcacccaagttggaatgcagtgacacgatctcaggttcaagaaattctcatgtctcagcctcctgagtagctgggattataggcatcgccaccacgcccagataatttttgttttgttttgtttctgagacagagtcttcctctgttgcccagggtggagtgcagctgcacgatctcagctcactgcaaaccccgcctcttgggttcaagcgattcttctgcctcagcctcctgagtagctggaattacaggcacgcaccaccacgcccagctaatttttgtatttttagtaaagatgggggtttcaccatattggccaggctggttttgaactcctgatctcgtgatccgcctgccttggcctcccaaagtgctgggattacaggcatgagctaccgcgcctggcctaatttttgtatttttagtagagtcggggtttcaccatgttggccaggctggtctcgaactcctggccccaagtaatccgcctgccttggcctcccaaaatgctgcagggattacaggcgtgagccaccgcgcccggcctgtacttttgttttcaataagtctctgcttttgttgcttcattctttcctttgtttgtttgtgaattttgtacaattatttaagacaccaaaaacctggacaccctccaccagtaacaaaaggattttccccaaagtatatttctttttttaaattttgagatggagtttcgctcttgtctagactggagtgcaatggtgccatcttggctcactgcaaccttggcctcctgcctcagcctcccgagtagtgggattacaggtgcctgccaccatgcccagctaatttttgtatttttagtagatggggtttcaccatggtggccaggctggtcttgaactcttgacctcaggtgatccaccagccaccttggcctcccaaagtgttgggattacaggcatgagccaccgcgcctggtctcccaaaatacatttttttgacatattttgaaatggccctccaaagctttcttttatgggggaaatctgcattctgtagagaatccccttcccttctcaggtctctctggagagactggcacctgtgacattcacatctcttctctcagaagcctgctacctgaaggcgtcatctacaagacaagaactttggcttccacaaccacccaccacttaccataactcaagctgatttcagctcttcaggcagagcttaccattttcaacaaattgccaatcagcaaatgttgaaatctacctatgacctggaaaccacccccacttcaagatgtcccacctttctgggctgagccaatgtataccttacctctgtccatttatgtcttttcctgtaacttctgtcttcctaaaatgtataaatcaagccttaggccgggcacagtggctcatgcctgtaatcccagcactttggctggccgaggcgggcggatcactcgaggtcagaagtttgagaccagcctgggcaacatggcgaaactccatctctactaaaaatacaaaaaattagctgggtgtggtggcgcgagcctgtaattccagctacttgggaggctgaggcaggagaattgcttgaacccaggat[132 bp omitted]gctaaatgagatggagagtggatgacaaggaggagtgaggtgccctgtgtgatcctccacgttttcctggaattaggagagcccaccgctgagaataaaatgcacccccaattcttggttcagggaaccacccactgagggggctggctgggagatgcctctcgacactgacgctgtcaaccctgtgtggaattgagaattccactggcttttgttcctggttcctgggaggtaacctgtaaatcctcagaatttcctgagtgatagtagtgtctgtgttactcacgatcgggcctcggaggacacccgatcatttatgcaaatgactctaggtccaggaagaccaaccgtgagattagaaggctgtggctctggagcctgggtgatggaaggtgattgaggctacagtgagctatgatccttccactgcactccagcctgggcgacagagggagcccttgtctcaaaacaaacaaacaaacaaaaaaatttaaaaattagctgggtgtgttggtgcatgcttacggtcccataagagggaccataagggaggatcatttgagcccaggagtttgaggctgcagtgagccgtgatcacaccactgcactccagcctgaacaacacagcaagaacctgtctcaaaaaaaaaaaaaaaaaaaaaagcagaaagaaaaagaaaacaaaattagaaggttgggtctttgagccacttgttatcagcctgacttccggggacggaggggctggagcttgagtttagtgtgtggtgtatgattcctccatcatgcctgcatataaaaccccaaggacaactctacacagaggctcgggtgagcttccctggttagtgatgctctgtctattgtcacagatggaggtaccaggagggttaaggtgtccctgaggataacagcgctttgcaccggggacccacccagcccggacgcagtgcttctggctgtggctggttctgattcgtgttcttttgctgtaataaaactgtaaatgaaacttcagcatttacctgagtgctgtgagtcattctagtgaattaggaatctgagggggtggtgggaacccctgaatttgaggccatctggtcaaaagtgaggaccctgaacttgcagctggtgtctgaagtgagggctgtcctgtggaggaaggcatcacctgaggcccaaccccaggtagttggtgtcaaatgtcattgcacctgccctgaaagaaagagggagagaagtgagggaaggggccaccttttggggagagctggtgtctgtgagaaaaggcctcaatcttttttttttttgagatggagtttcgctctttcgcccaggctggaaagaagtggcgtgatctcagctcactgcaacctccaacccccaggttcaagtgattctcctgctcat[132 bp omitted]tgacctcccaaagtgctgggattacagacgtgagccaccccgcccagcccctcatttttctctttctctctctcacctgacctcaggtgatctgcctgcctcggcttcccaaagtactaggattacaagtgtgagccatgcctgagcaagcctcactcttttttttttttcttttgagacagagtctcggtctgtcacccaggctggggtgcaatggcgcgatctcgactcactgcaacctccgcctcccgggttcaagtgattctcctgccttagcctcctgaacagctgggattacaggtgcctgccacgacacccaactaatttttgtatttttcgtagagacggggtttc[135 bp omitted]ttctcttgaaaccagatggaggttgtaggggttggggacacagtggaatcactgtctgtcaagtgtgtgggagggcagggaagcacacctgtgttcctgctggctgtcttggctgtgcattggctgctctgccctggggctcctgaggtttggaaagcactgagggctgggaccacccatcccttcaggagacgtttttgtttgtttgtttgttttttgagaccagtctcgctctgtagctcaggctggagtgcagtggcacaatctcggctcactgcaacctccactggaggggttcagtcaggatggtgggagaaattgtaaaataaacacaaactttcttggaaggcctgaaggtttttgcaaaagcctcaaaatagagttatggctgaaggcagcctaatcctctttgagttatagcaagggtaattaacacaggaatgtagaggagtctatctaaatagcttgtttacccacgtggtcctaagactaacctttgaccatccatgggtgcaagattgctgtctacctggggggtgagcaatggtaattaccttctagtggtgtttacttgagacgtttgtcatttaatgtgtgctgaacaaatgccagcagggccagccagtcgaggccatggctgctattctttacagcaccttccttggtgtctgtgaggggcccagacccttagctggactgacaagcagaatatctgtgtcagtgtaagttattcatccgtcgttgggtcaggatctgcgggacggactccccccacccccgcactgtacctcccaggttcaaatgattctcctgcctcagcctcctaagtagctgggattacaggtgtgggccacgacacgtggctaatttttgtatttttagtagagacaggttttcac[149 bp omitted]agtatggtcgagtccagagtatgggaatcccagtcctgcggattacgggactgggagtgggggtaccctctcagagcaatatggcatgaggccacctcctggagtcagcagaacgtgtcacccaggggagccgcttaggagaccgcctctcatcagcaggcctgagcagctgtcccttggccacaccaaatcagtagagccctggttctcagtcagtggcaagtgtgtcccgcaggggcatttggcaaggtccggagacatttttggttgtcacaacttgggggctgctactggcatctggtgagcagaagccagggacgctgaggaacagtgcactgacaggcccctgccgcagagaatgagccagccccaaacatcaacagtgctgagcttgagaaagcctggtctctgcaacaaagcccccagcaaggggaaagcagcgccaccacccatcaggccctgcgggaatcacatctgctttcaatttctctccttcctgccgcagcctcacagaatcagcacagggatggggcggtgggggaagagacgtgccgtgtcttcaccccagtgttggcgcctgtgctgggaagggatgagggtcttttgaggcaggattgactttttttttcatttttttttttttttttgagacagtctcactctgtcgctcaggctagagtgcagtggtgcgatcttggctcactgcaacctccatctctctggttcaagcgattctcatgcttcagcctcctgagtagctgggattacaggtatgcacctccacaccctgtgctaatttttgtattttgagtagtgatggggtttcaccatgttggccaggctggtctcgaactcctgacctcaagtgatctgcccaccttggcttcccaaagtgctggaattacaggcgtgagccactgcgcccggcactaggctgtcttaatagcaaaacatggctagaaaaatgtggaatcatactgagtgccctcgtggggaatcttatgctcagtggaaatggagatttcgaacaaacagagctggtggtgtttatcagagaaaattaaaccttttgttaatgttcactttaacaggacatgtgtccttcatgaaactggctacatatgtgcatcgcttagcccggggccggcacaaaacaagagctggataaacgttagccgcttgtattgagagggaagtgagccggtggtggtgctgcatgcctgtagtcccaactgcttgggaagtgaggcaggaagattgctttagccccaggagttagaggttacggtgaactaagactgcgccactgcactctagcctgggcgacacagcatgaactgctcttcaaaaggcggtggggattctaactcctgtccctggaatctgggttggtctcagtgacttgcttgaccaaaaagtggtagaagggacattctgggatgtctgaggctcaggcatgaaaagccttgcagcttcggcctgggtctcctggactgactactcctgggacattccctcctggagccctgccgccatgtcacacaaggggccacactctggccagcagccccagctgagctgacagctgacagccagcgcctgttatcatcgccatggtaaggagctgtctcagatgtttagccccgctgacgctgcaaccaccggagactccaagtgaggaccacccagctgagacccatcagccggcagcccacagtgggggttagtaaattactgcttcaggccactgcactttaggatggttcactactcagaagcagataatgtgaacacttccccagggagtcaagtgctttcagaaacatatgctgttttcttggatgaaaaattgtctttctagtgattatccaggaagggttcacacaaatgggatatcagggctggtggaaagacacgagtcggacaccgttatgagcccaagttccagactgtgcatagagccaactcctaagccaggtagccttgacctgagagcttcccagcacctccttccccttccccactgacccatggcttcctccttcattctcctcttctcatcattcctttcccattccttcacacatttcaagctgctattccaaaactaccaccatggaaacacggtcaggttcttagaaacctaacccatattgggaaataacagtgcggcgagaggtggaggcagcaggaaaattctaggctaacatcctagctggccaccagggtgcggtctcaaagtcctcatggtaggaaggtaagtttatcttcattttacacactagggaaaatagactccctcagtaattaaataccaattagctcttaagaaaaatgcattttcaaaattgtattactgttcaacagggaaataggatttaatttagcttttttttttttttaattcacaagagcgcctgctttgacaccacctagcgggagccactgtaggaacggcaaagccaggcctgaccccgcttctcgtagagcctgggtggcagccagtgctgtcactgttcccacattcccacgccggtgtctgggaggatgtggggagagattataatagtatgtgtcatttctgcagtatgcctgattcatttccagatgtgaaatagtcactgggatcactatagttcctaatgcctttcttttttttttctttttttgagacagagttttgctcttgtcacccaggctggagtgcagcggtgcgacctcagctgactgcagcctccgcctcctggattcaggcaattctcctgcatcagcctcccaaatagcagggattacaggcgcccaccaccatgctcgtctaagttttgtattttcagtagagatgaggtttcgccatgttggccaggctggtctcgaactcccgatcgcaagtgatccgcccgcctcagcctcccaaagtgttgggattacaggtgtgagccaccgtgcacggcctaatgcctttcaagaagttttctgtggcaattacacaaatctccctgaatccttatttagtttgttcatctacttggaaaacagccttcctttatactaagtcagtagttcccaaacttgtctgtaccttagaatcactggggaactctggaaaattccagaccaggctgggtacagtggctcatgcctataatcccagtactttgggaagctgtagtgggaggatcacttgagctcaagagtggccagcctgggccacatagtgagactctgtctctaccaaaaaaaaaaaaaaaaaaaaaaaattgggcacagtggcatgcccctgtggtcctagctactcgggaagctgaggtgggaggattgcttgagcccaggaggttgaggct[131 bp omitted]tggcagtggggcacaggctctgcaggtgattcctacgtgctccctagttggaaacctcagtgctaaatgaccccagaagtagatgcggccctcagccattccctaggcaggcacccttgtgtgcatctgttgccttctctccagaaagcagcttttcttaagggatagcccgaggccaaactcaggagtcctcttagtacttaccacatccgagcgtggtggcacgcgcctgtagtcccagctactggggaggctgaggcaggaaaatcacttgaaccagagagacggaggttgcagcgagccaagattcctttttaaatagcggacattttaaataataataataaaaagaaaaataaataatctgtggtgaaattcacataacatcttaaagtgcataatcagtggcattaagtacactcacaacgttgtgaaaccactacgtctatgtagttccaaaacatcttcatcaccccaaaaggaaatcccatgcccagtaagcagttctacctcattctccctctccccagagtctctggcaaccaccaacctgccttctgtctacaaatttgcttattctggacatttcgtagaaattgactcatacaataggtgaccttttgcatctggactctcactctgcgtcatgttttcgaagttcattcacgctgtagcatgtgtcaggacctcattcccttctatggacaaataatattccattgtgtgactaggccacattttctttatccagtcatccatcaacatttgggttgtttccacctcttgactattgtgaataatgcttctatgaacattcctggatgagtttttgtgtggacatgtttttatctctcttaggtacagaccagaactagaagtggaattactaggtcatatagtaaccctatgcttaattttttaaggaatctgagtctctcattctaaaagacatttttctcaagcaccggttggtaaatctggcttagttttccacatctgtgaagaccattttcatgggtgacatgccagccttccttgagcatacgtgacacgcaggctgttggtttagaactagaattaggttcctgctgttctgctcagggtccttgcagatgagaaacccctgccacactgccctcctgcagcagccgtcacccagacagccacccaaccatgcttcttttttttttttttctgagacggagtctcgctctgctgcccaggctggagtgcagtggcacgatctcggctcaccacaaactccaccttccaggttcaagcaattctcctgcctcagcctcccaagaggctgggactacaggcgcgcaccactatgcccagctaatttttgtatttttagtacagatggggtttcaccatgttggccaggctggtctcgaactcctgagctcgtcatctgcccgccttggcctcccaaagtgctgggattacagtcgcgagccaccgcg[132 bp omitted]tgagacccagtctctagaaaaaatacaaaataaaaaaaaaagtagctgggggttgtggtgcgtgactgtagtcccagctactcaggaagctgaggtggaaggattgcttgggcccaggaggtggaagttgcagtgagctgggatagcgctactgcactccagcctgggtgacagagtgagaccccatccggaagaaaaaaaaaaaaagatttgaggcggaggttgcagtgagctgagatggcgccactgcactccagcctggggtgacagagcaagaccctgtctcaaaaaaaaaaaaaaaaaaagactcaggcctccgagacaagcacgctcttcagcgtcctgggctttgctgtggctcctggctcccgctcagcctttcccaggcggcatgctcctataccactaaaggctgcaaattgaggtgacagatctgctagtgggactgcacatgcctcttccctcaggaatgacacgcctgccaagagctgaaaggaggcagagccaaccctgagtttatcatcttttgcagttattgagtgttttctttctttagaagctcaaaattctcaatctgagagtcaagtaatggcagatacttgtcacacggcaattggaatcggaactcggtctttttttttttaggcggagtttcgctcttgttgcccaggctggagtgcagtggcgcaacctcagctcactgcaacctccgcttcccgggttcaagcaattctcctgcctc[133 bp omitted]cagcctcccaagatgctgggattataggcgtgtgccactgaacccagtcttaaatggtttgtgcttgtttgcaaatgccgcacgtcctgatgctatagatttttctaggccatgcagagtcacgaagactgatgtgtctttttaactctgcattgggaccatctgtacctcaagggacccatcagcctgctgtgcccagccaggaggaggtggagtgttggacggtgcctttcctggccctccattgctgcaatgcacccggctccctccctggggtgccgtgctgcatctgccagcgattccaatgggagaggtctgcctgcgggcatttcttgaggatttttgtgtgcagaaccttgctgattatagttctagggaagatgcgaaaagagaaaagaaaaggtatgtcctccagccacttgtatgctcctcactgatctgaaaggagcactctctgggccctctcaatttttttttttttttttttttttttttttttgagatggagttttgctcttgttgcccaggctggagtgcaatggcgccatctcggctcaccacaacttccgcctcccgggttcaagcacttttcctgcctcagcctccggagtagctgggattacaggcatgcgccaccacgcccggttaatttttttttatatttagtagagacggggtttctccatgttggtcagcctggtctcgaactcccaaactcaggtgatctgcccgccacggcctcccaaagtgttaggattacaggcgtgagccactgcgcccagcccctcaattttgttttttaaaataatttcagtattagcctgcatgcgttgaggtatcagagacattaaaatatcaaacttgcaggtcccctgaggtcaggagttcaagactagcctgaccaacatggagaaaccctgtatctactaaaaatacaaaaattagctgggagtggtggcagccgcctgtaatctcagctacttgggaggctgaggcaggagaatctcttgaatccaggaggtggaggttgcagtgagccaaaatcgcaccactgcactccagcctgggtgacagagtgaggctctgtctcaaaaaaatatgttaacaaaataaaattaaaaaatcaaactctccagcccttataaaggtaatcacttggttacccattcagtttcaaaatggtgagtttcaggcactgctaggatcatcaaatggtgccttgaaggaaaaatgacatcttaactcattctcaagatgccagtcacgttgccgtgatcaggactttagggcaatgagcaaagagaacaaggaactctgctgtctgaaacagctctcctgtcggatcagcctagcgtcactcctgtagctgcacaaaagctcatgggcaccagcctggaattaggcgtcccttgtcctaagcacccctccccagccccagctgtccagcccatcctgtctaatcattacttaaattaccagggttgtgtctggaaagaattgaagggtttgaccttcagaagacaagcctccaggggaggggaatttctattttttggcatgtggataatgaacacaggggagggcaatccctgctccgggctccatgtctttttccagcttgtcaaaataggacgtccacaccctcctttgcccccaagtccccccactaattggcatcaatcgaggaagtc[145 bp omitted]accgtctctactaaaaatataaaaattagccgggcatggtggtgcatgcctgtaatcccagctactcaggaggctgaggcaggagaatcgcttgaacccaggagacggaggttgcagtgagccaagattgcgccactgcactccagcctgggtgacagagcaagactccatctcaaaaaaaaaaaaaaaaaaaaaatagaggaaaggagtgaacccctgagtggccagctgggtgcctcaacggggtgtctccaaaggcagcttgtgcttgtttgtgaccagggtgacaaaggacttcactgtcctgtagcacagatgaggttccaccctcaggtgggtggaaacagcccaggccattagtgcaaatcccctgcctggcccagggccacgttcagcccactgtctgtttgctttgggacccacccaaggtcacattttagcttttgagaaatgtgaaagtggaaaacattgcaaaacaaaaagcccctggaaaactgtgcacacacccatcccctcagcctgatgctccagcttggctgctaggagatcaatgcagctctgccttcctgctccctgtgcagaggtgccggctcctgcttcctggttcccagctttccttttgggaactgcctgaggtggtttgacacacagctgttgggcttctcttcccttgaggtctctgaaccagggcacccatgcaggtaaacacaaaagcggagtggggtggaatgggggtgctggctgtagcctcggcagaaggggacccgcctctctcctcacgagtatccaggatgtgggactggatattgaccagaccagaacccactttgggcccacatgggagctaatgtcagcaggggcctgtggactgttcccattgaacggctcttcctgctagctgtggttctcagtgtggctggcctggtccagcctggcacaggacaggacctgggagggccacacatttcccacctccattttgtgcccaggggacctgtgccagcagcaagcccttcctgcaaagcagtgtggggaattctgccaggctgcagatggatgggccggtctgcttccaccccttcctcaggtgcaaagttggggttttgcgatcctgtaattactatgtttagcaaagttgccaatttctccctttagggtaattttcaaaaatggaaaccaattttctttgtaggggcttctgctggataaaccaaccaccacaaagtctacagaaacatgtctccaccccagcctcactccacaaatgcttctttggtggaaggctggttcctggtttgtgttcatttgggtagagctggggagggagtaggagtcagaaatgaaggttctggagcccaaaagccactgttcccagactaagtttgcctaatcatctgtggttggcaaaacccctcaaagatgtccacgtcataatcactggaacttgtgagtgcgtgttaccctatatggcaagagggattttgcagatatgattacggattttgagaaggggagattgtcctgggttctctgggtggggtgaatgtcatcacagggtccttatatgagggaggcaggaaggtcagagtcagaagagttgtgtcaatgggagcagaggtcacacagagatagactggaagatgctatgctgccggctctcgaggtaaaggaaggggccctgagccaagggatgcaggtggcttctagaagccagaaaaggcaagggaacacagccctgcaattcatcttatattaggttggtgcacgaggaactgtttttttttttttttttttgagacggagtctcactgtcgcccaggctggagtgcggtggcgcgatctcagctcactgcaacctcccaggctggagtgcagtggcgcaatcttggctcactgcaacctctgcctcctgggttcaagagattctcctgcctcagcttcccgagtagctgggactacaggcacacgccaccacgcctagctaattttttatttttagtagagacggggtttcactatgttggccaggctggtctcaagctcctgacgtcgggtgatccacccgcctcagcctcccaaagtgctgggattacaggagtgagccaccgcacccggcctgtttgttttttgagacagagtctcactctgctgcccaggctggagtgcagtggcacgatctcaggctcactgcaacctccgcctcccaggttcaagcgattttcctgcctcaccctcccgaatagctgggactgcaggtgtgcaccaccacacccagcgaatttttgtagtttttagtagagaggaggtttcactacgttggccaggctgatctcgaactcctgacctcaggtgatccacccgcctggacctctcaaagtgctgggattacaggcatgagccaccgcttctggcctggggaaattgcgttttttggcattaaaagtaatggtattagcaaccattctaatacttctgatcttctgcaagataaaaaatttgtgttgttttaattgtgtgtagcaataggaacctaataccccatccaacacgacactcagctttgctcttccaaagactggggaagaaacccatctgctcaggaagctgaggatgccatacgccaaggtgtaagataacatctgaaagtcaagggagcaggagcacaggaagtctggctgccagcataggcataaacaactcctcccagtagatcacaccttggcaaggctgggaggatggaggcctggcagccaaaaacccctttcctcctgtacccttaggagactacactatcttctatcaagacccctggtattgttacatcttttcattcaaaacttgaaacactggccaggtgcagtggctcatgcctgtaatcccagggctttgggcagctgagacgggatgattacttgagcccaggtgtttgagaccagcctgggcaacatagggagaccacatctctacaaaaaataaaaaaacaaaattggctgggcttggtggcatgcacctgtagtctcagctactaaaggggatggaggtgggaggatcacttgagcccaggaggtcgaggctgcagtgagctgtgactgtgccactgcactccagcttgggtgacgatgtaagaccctgtttcaaaaaaaaaaataaataaaacatgaaacactgattcacactagggccctaataactcactggttttccctccgagtcatctgtagcagaaaaagaacaggcccacgggccctacggaaaaagttccaactctttcccagggagagggccctctgaaggtgaaggcagagacggggacgacgcagcagcaagacacggatgaccaaaggctgtcggcaaaccaccaggacacaggcctgggacagagtcacagcctcagaaggaaccaaccctgccaacaccgtgatcgtagacttcccaacctccaaaactgtgagacagtcaatttctgttgtctacgccaccaggacactaatacaaatgcctatagatgctgggcaggcagctgagacaaatggagtgggtagggctgcagctcgccaccttgagagggctctgaagagaatcaccctgaattgcagccacagtcagcagcctggaggtgagggcatgtgacaggcagagcccagaggcccagaagagacctgggtccccagcctcagcaaggacgacaaggacaaggagaccacccaagggatagagctagggtcaccccaccatacactcatcatagtcaaaccactggggagaatcagaaactcgggcaaagcacacactccctgcaagcagccaagaatctcgcatgaccagtctggtcctctggatctccacatgtggccacgtgtggcgcgtggcatcccctccaccccaatgcctggtatggtcgacctggaaatgacatctaggaaactgagaatggaaagccatgtgggggcagcgctaagcttttttttttctttttctttttttgagacggagtcttgctctgttgcccaggctggagtacagtggtgcaatctcggctcgctcttgggttcaagcagttctcctgtctcagcctcctgagcagctgggactacaggcacctgccaccgcgtccgacgaatttttgtatttttagtagagatggggtttcatcatcttggccaggctggtctcaaattcctgacctcgtgatccacccgcctcagcctcccaaagtgctgggattacgggcgtgagccactgcgcccaaccagccctaagcttttttttttttttttgagacatagtcttgctctgtccccaggcaggagtgcagtggcaccatctcagctcactgcaaccttcgcctcccgggtccaagcgattctcctgcctcagcctcccaagtagctaggattacaggcatgcaccacaacacccagctaatttttgtattttcagtagagacgggggtttcaccatgttggccaggatggtctcaaatctcctgacctcatgatcacccgccttggcctcccaaagtgctgggattacagatgtgagccaccgtgcccggcccctaagctcaaagagcttgtgagatagaacctcccccttccccggtccttgcaaccccctaggcagtaaagtaccataaaaagggaaaaaccggagtggtggctcatgcctataaccccagcactttgggaggccgaggcaggcggatcacttgaggtcaggagtttgagaccagcttggccaacatgtgaaacacaaactctactaaaaatacaaaaattagctaggtgcagtggctcacacttgtaatcacagctattcgggaggctgaggcaagagtattgcttgaaaccgggaggcagag[133 bp omitted]ctgaaatctcctagggaaggtagcttcagggaagggtgagatggcaggaatcctctcctcataaaagcaagtaatttgccatctggcagccttgactccaagtttctggagagctgggaccaggccaggtgaatgcctgctttctttctcgggaaaagaaaaaagggggttctcaggtgtgtctccctggggaggctgcccacaaggaaggggaggctggggaagttagaaaaagtctcccacctgtgaagcagattacctgcaagccaagctctgggttggtgatcaaatcagacctctctgccggcccaggcctgttcccaggcccacggtgggccttgctgagcacagcggctgctcagctgtttccagactcaggatgaagcctggggagggcttggagctgcttcctctttctttttttttttgagatggagtttcgccctgtcacccaggctggagtgcaatgggacgatctcagctcaccacaacctctgcctcctgggtgcaagcaattctcctgcctcagcctcccaagtagctgggactacaggtatgcgccaccacacccggtgtagagacggggtttgagacgggtttctccacgttggtcaggctggtctccaacccccgatctcaggtgatccacccacgtcggcctcccaaagtgctaggattacaggagtgagccactgcgcccggcctgctgcttcctcctcctcagggagacgccacagctctgcggcaagcaatccaccaggcaccagatccccagatacctgcccttcagggagaaatagcctgggatacagagaggcccagaggggagctctggctggacttggcttctcagcgtggggtctgggttcacaggtttgcttctctgctttgtggggaactggttggaggcttgtgcaagcctcttcacctctcagggtttcaggcccccccaactccttcccgccttgtccttttttcttttttaaaaaaggaagtaaagtacagtgggaaacgggccaagctggcagcttgagagatccaagtgcccgccccccgacccgcaaccgtgggaaggggaaccatcttgctcttggccaatcctgcctctctgagcagggatgcagctgggggagtttctggagataggatcaaattctttagaaagggagaaggggaaaggggtctggagaaaggcagcctgggttgggggaagtgaatgacaagaatgaggggggcaaaggccttggaggtgaggggggcagggggttaggcgccagggaggacagaggacccattgtgcggcctggaaccggggccagagggctttgcccttcgcctccctcccgcggggccttccagagccaggaggggagctggggcccggaggcgttggataaagagcccgtgccccgcctccccttgccaactcagtttgcagtcaaccccgcccccgcccgctccgcggactcaaggctggtggtagtgggcctggaggcgcaggatccgacctttctggggccccaggaggaaaaaaaaaggggggaccctgaaccaggtgggctttatcaccacgaactcacagtgcttccctgtgcctcagtttcccctcttcagactctatggctaatgacagagcttttcagatttggtggaaatgctctccggggcggggagcagacggggaaggctgccccagctaatctccgcagccagtaccctcgaaggctgagatctcggggagcacagcctccgattcgcgttttctaggcaccaaagtccctcgctggaggaagaggaggggaagaaggcagaggagaggggaggggcggacggatctggtcctgggctcccgcgcggagccccctcctcccacagccgccgctcgcgtccccgcagcgcatgaccgcggcactgcggctgcagggctctctcccccgcccgcgccggattcctggagcaagggggtggggggctcggaggtgcaggacccatcattccgacacgcgccgcgacgccaggagtcggggatgacgcccctgctccctcccctcgttcctgtttctcggagtttttcgacccctgagcgcgtcgctgagtcaccttcccggaacgcgctcgggacgctctggacccagcggggactgcccgggggccgcgcaaggcgaaggcgcacccgccgatacgcgcgcggagctgcggccccagggaccccgcgtcccagccagtgccccccgacccgcccggggactctcgggtcccgcccgtctgaccccccaagtgttgggaaacggggccgagctgcctgggtcctccggaagagaagacaccgcggaggcgtgccggagttcagggcgccgcccggctaattggctgcgtgctcctcctggacctgcctcttctcgactttaagaagcgatgagagaggtgtgtgggggcgggtggggccggcgggggcgcgcgagccccgcagcctcccgcaggggcttggtttctcctaactctggccctacctgggcaggtcaccaatgggccttggcaacttcttcctccgtctccgccgtaaccccccagggatctaactcgaggtgctcgcggacacgttctgtggcttgccgcgataagtgtatcacaaacacactgacaaacgcgtccctactggcctccaaagaagtgacaacttctgagcgcgtttccggcgccccttcttcacgctgagccagagggggcggggggcacgtaccacatgcttggctttccaatcccgacgggggcccccaggcccatctacactgtcaagcctcctctccggctcggagcccccggcctgtcgcctgctctacccgggacagcgcgctaggcggcctcaggctcggtagcccagctgcagcgtcgggaagttaaaaataacctccgtgggagcgcgggggaggaagaaagagggaagctggtgggcggcgggcgagacgccccggcctggagaggcgccccgggtggcgtgcgggcctcgaatttcgggtgggctagggcagagcgcgcaaaaggggcgctgcatcccggcgccgacagcacccgcgggggcgaggtcgtggcgtcgaggtgaaaccaagggtcccccgggagagcggagccgcgcgcgcccggcgctcgctccgacacgagttcgcgcggagcccgcgcctccgtctgcgctgcgcggtcgctttcgcgcgccccagacactgcgctcgcggccgggcccgggactccgcgcctcgcggcctgccgcctcagctcacccggccaggtcgcggcgccgccttctagccagacgcctaggacgagcggcgggggcgcgcttgccgcttcctaggacccgggcgggaaccagctcgtggcccggccgtgggcgcgggccgtgccggaggcggcgcgctgaggccggaggcgggcagaggccgaggccgcgccgggctcaggttccacccccgggagcgcggggcggagccaggccggcgccgaggctcagtgccctccccgctccgcggcgccggctgcgaagttgagcgaaaagtttgaggccggagggagcgaggccggggagtccgctccagcggggcgctccagtccctcagacgtgggctgagcttgggacgagctgcgttccgccccaggccactgtagggaacggcggtggcgcctccccagcaaaccggaccgactgggtagggccgcccaccctgccttcgcgccgctcgtggctcctgtgcggcccgccctcgcggggccccgggaactgggccacttgtcgcttgggcgagagcaggcggcagctggtggcccggttcgggcttggctttggcgcgacccgggagcggctcccacgagcgccgcgcgcgtcgcaacggagcggggccctgagaagcgcgcgccgcggctcccaccgctctggagctccgggcaggggacacggcaacctggatggctggggcagggatcctctcccagaacttcgtgcccagcaatgtccgctcaagttctgggatttttacgcagctggactcccctccccctggcagccccgaggggtgaggagctagtccgtcggagggagccacggggctctgactcatccgtcgggccggaaccgaaccccaagccccagggagaaagccccggagcaggcgcccttctcagggattgtaggcttagtcacacggcgggggcgccctcggaggcaccggacctcagctctctggacttcccgggaacctggctccccgcgcgtggtcccgggatttagtcgggcgctccccacctctggcagctgcggccccggactccgccagcgctgtcttctctccctcaggtccagccgccgcagggaatgacgccggtgctcctgcagccacggctccgggcggggaaggcgagccccacagccggccctgcgacgcccgcctgggcagcaccgataaggagctgaaggcaggagccgccgccacgggcagcgcccccacagcgccagggaccccctggcagcgggagccgcgggtcgaggttatggatccaggtttgtggggttcctgctgggaagggctgtagggggattcctgttcctcgccaggaatgatggaacgcccagctggacgaaaggggctgtggacgatcgggagaaacattatccctcacgaggccagaagccggccgaatctgagccaaggaagggggtggcaggggcgccgcgtccccaccccaggtctcccagcaaaggccgctcctctggccagggtcaattaccggggtgtttcgggcaccaagttcccacactagtgccccattgttacccgtggccccctagtggtcggttgcggacgtggcctctttggttttgttttctcagcgggcggcccccggggcgtgctcccgcggccctgccgcgtgctggtgctgctgaacccgcgcggcggcaagggcaaggccttgcagctcttccggagtcacgtgcagccccttttggctgaggctgaaatctccttcacgctgatgctcactggtgagtacctctcggagggggtttcgggagcatcccctggcaggggacccccccagtcctgatagctgccggtctccctgcagagcggcggaaccacgcgcgggagctggtgcggtcggaggagctgggccgctgggacgctctggtggtcatgtctggagacgggctgatgcacgaggtgaggaccgcactgcgcggctaggcctggggcttggcgcggtgcgtcccaggctgaggccacgtgtgcttcaacaggtggtgaacgggctcatggagcggcctgactgggagaccgccatccagaagcccctgtgtagcctcccagcaggctctggcaacgcgctggcagcttccttgaaccattatgctgggtgagagcccagggccagagtaggcctgtttcccgtcagtgctcctctaccgcgggggttttcttgtctaagctcccataggctgagatcatttccatttccccttctcccttagtcctggggccctctcctggtgaccccagctgactgcttccatttgctccatctgtcacctaccagtcctgccaactccccagggaccacatggcgctttgccagctcccactccccgggaggaggaagcgggggatacatgggggctcctgtcctgccttatctgactttttccccctgcagctatgagcaggtcaccaatgaagacctcctgaccaactgcacgctattgctgtgccgccggctgctgtcacccatgaacctgctgtctctgcacacggcttcggggctgcgcctcttctctgtgctcagcctggcctggggcttcattgctgatgtggacctagagagtgagaagtatcggcgtctgggggagatgcgcttcactctgggcaccttcctgcgtctggcagccctgcgcacctaccgcggccgactggcctacctccctgtaggaagagtgggttccaagacacctgcctcccccgttgtggtccagcagggcccggtagatgcacaccttgtgccactggaggagccagtgccctctcactggacagtggtgcccgacgaggactttgtgctagtcctggcactgctgcactcgcacctgggcagtgagatgtttgctgcacccatgggccgctgtgcagctggcgtcatgcatctgttctacgtgcgggcgggagtgtctcgtgccatgctgctgcgcctcttcctggccatggagaagggcaggcatatggagtatgaatgcccctacttggtatatgtgcccgtggtcgccttccgcttggagcccaaggatgggaaaggtgtgtttgcagtggatggggaattgatggttagcgaggccgtgcagggccaggtgcacccaaactacttctggatggtcagcggttgcgtggagcccccgcccagctggaagccccagcagatgccaccgccagaagagcccttatgacccctgggccgcgctgtgccttagtgtctacttgcaggacccttcctccttccctagggctgcagggcctgtccacagctcctgtgggggtggaggagactcctctggagaagggtgagaaggtggaggctatgctttggggggacaggccagaatgaagtcctgggtcaggagcccagctggctgggcccagctgcctatgtaaggccttctagtttgttctgagacccccaccccacgaaccaaatccaaataaagtgacattcccagcctgctcgtcctgtcctggtgactggggagagaatgggttctcgttctggccgggactatagaatttaatggtaatgatggccaatggtgccccctgggatgggcaatggattttactggccccaggcatagtcattctggtgggggactcaggaccagagctggttcagcctaatggtgggggggcctctaccaccctgataattatagcacctccaacctgaagcagcctcagagctcagccagctgcctgaccacacacaggatgcagctcggagctggcatgtctcagccagggccacacaagcagctagtcccagcaaatctcatcagagccccatgtggatttagcaggaaaggggaaatatctgagttaagggcattagaaaactgatgggccaggcgtggtggctcacacctgtaatcccagcactttgggaggctgaggtgggtggatcacttgagcccagaagtttgagaccagcctgggcaacatggtaaaatctcatctctacaaaatgtgcaaacattagcagggtgtggtggcggacacctgtagtcccagctacttgggaggctgaggcaggagaatcgcttgagcccgggaggttgaggctgcagtgagccgagatcgcgccattgcaccccagcctggctgggtgagacagagtgagaatgtctcaaaaacaaaaacaataaaaccactggccaccgcccccgcccccccccaaaaaaattggcaaggagcaggagacctcagaagtaaaaaatggcaatatcttgctttttttttttttttttttttttggctcactgcaacctctacctcccgggttcaagtgattcttgtgctcagcctcctgagtagctgggattacaggtgcatgccaccatgcccagctaatttttgtagttttagtagagatggggtttcaccatgttggccaggctgatcccaaacccctgacctcaagtcatctgcccgcctctgcctcccaaagtgctgggattacagtcatgagccaccacacctggtatcttacctttttaaaaggagtctgtcatccaccacaatggtctagggttctagggttctcccagcctccctcagctgtctcctttccctacctgtccctgtggaggagtgccaggcaggagtggaaagaatgtggcagggaaggatccatccaagtctaaactgggcaaccattttggcttagcgtccaggagttgtggcacctgtccaccgccaggtgctatgacgtcggctctcccagaacctggaaggagctgaactggtcagttgtaggtctctggagactacagctgctgggaggctgctctaagctggctcctgaggggcacaccaccggccaggaggaggccagaggactgctccaggacaagaagtacaaaaggcatgcaagcaggtctggcaggcagagggcagtgtgggcgggtgggggtgctgttcacagtggcccccacctggccaggaaagccaggacccactgccacatgccttccctggcaacaaacaaggtctttccttccccaggaagggtgtgtgtgagggacacaaaggcaacggagcccagatgaatggcagagggaggtttaatggtgtcaccttgtcttgctaatgagccaacacaaaaaaaaaaaaaaaaaaaaatgcaagtaaaaaaaagtttaatcacacagcactttatacagatatcgtaagcagtaggcattcacatctccacatgtacaatgcactgggaagcacagccccaccagtcactccgggtgtttctcaaacaagataccgactcggttccaaatgccacggtgtgtggtccggctccatcctcccgcagctctgctggctgggcggtcacagcacagcacaggtgtggagcccacttaaggctgacaagacgcatcatgctttggctttttttttgtctttttttctaataagagttaatatctttgcttttgagttttttttccaaccttaaatattacatacatacaccaaaaattacatagctgcaatgtgctcaacagcatcctctcggcctggagcttcacattatcaaaagcttagaaaacttgtaaacctctgggcctgtctctgggcactaggagagcccccgccggccgtccccttcggattgagcctgcagtttgtaagcgaagggctgacagtaggccttctagtccaagagagggctggctcgcttggagttcagtgagctgcacgcctgtcccagtgtgaccatgtgatgggggaggggccctagcacttgccctggccttgtgcagctgctcttgcccccagcagcctccgacagaagagcaaggcacctatagctgttgctttccctgcagctccctggtcctcaactccatgtgcatgtgtgaaggccaccacctctcctgggcgtcacccggaacctagcctggtcccaacctctcttagagagcaagttcaacaggcctgagggctataacgtggtcgacaggccatgtatagccgggagtcagtgacagcagctacaactcccaagggatagtgttgacgctggaggactagggaggacctgggtggtggtggcagcaggagggtctgggacacagggaggcttgagttgaactaaacaggttgaaagggaccaggggaattgttggcgcaacccacacttcatgcaaggcacatgtgctctcctgcgggtctgcagggaaccggcccagagagccccgcggcaggccctggaacacccgcctctgacctgagaaggggcagcaagggagcaagtgccggacattctgctggggtgacaaatggaaaatcggcaacagggttccgattttctttgccacaggggacccgcctgttgaaagctcgcttcaaaatagaaacggcagcatctcaacacacttcttgcacttcagcatcaaactcaccttggggagaagagggcagtgggtttgcagtggggacagaggggcatgggaagaggggtgattccgggggggagtgagcaggcggcggctggcctctcccacggtgatgctctttcctctgtgcctggcagctacttgtcctctgtgcactccggcatgcctgcctctagcagggcagcccggaactgcgtcaggacaccccggatgctcttgatgaaacccttggaaagtgggaagagggggaagccgatgtcagggtagccactcttctcaggtaagaagctccggtagctctttctccgcttctttggtttcacactgggtggcaccgatgcgtctggtgcggtctccgaagtctggtctgtgtggtccctgctagctgaggccaggccctgggcaccgccctctgagtctgagccctgggaggcctctcctggggctggccctccatcctcaggttcttgttggccggagtctgacagctcggctacagctgggggctctggcgagctgctggccttgggcaccccgttgggcagtgcctgggccttctccagcagggcatgggtttccagccaggactcgatacggttcaccagccgccagccaccagtgctaaagtgttgcctgatctcctgctcaaagacctcggggggccgccgcaccagctgggtcatggactgcaccacgcggatcagcgccatctcattgtaacagcgactgttttcatagccttcctgcaggcctcggtcactgtcgaagccggcttcgttgtagtatggttcatttaccaggatcagacctgtgtgggcgggacaccttccctcagtgggtgagagaggcccacaatgcaggcctaccctccacctgccagggggactatcagagtcactttcctccaccggccctcccttgtccgcacccccgcttcagcccaactgtaccttggatggagatgagcacctggagaaggctggacttgcttgtccacctctctgtcccctgaaacacacagggcaccatcaattctgttccccaggcccctatccaccagtggctcttcctccttcttggctgggggcctggccctatactcacctttccaatccaggtgcccaggaggctgacacacaccttcccattgtcatacaggttggggttcaggcggccactgcattgggagaggtagcagaagtgggggggcacggctgggtagatgttggggagctggatgtcaaacaagtagaggccatcctcgtagggggttcgagtggggcccttgatgagagctgagaagaggtcctaggtagggagggagggagggaggccaaggttggcaggggtggaagggggtgtcctacatgtggcatctgcatctgcacctgctctttcccaggacactgtgcagatcacgcaggaagagcagcacctgggactccagatgccaccagcagtggagaagctaaggacaaatctctctctgcagaacagcctggaatcttttttttttgagacagggtcttgctgtgtcccccaggctggagtacactagtgcaataatggctcactgcagcctcccaagtagccgggactacagtgtgggccaccgtgcccagatgatttttttattttgtgtacagacagggtttcactatgttgcctaggttggtctcgaactcctgggctcaagtgatccgcctgcctcggcctcccaaagtgctgggtttacagccctgagccgtcactgtgcctggcccttgcctggaatcattgaaccctggctaagagaaatactcgaagtgagtttttatcttatcaggtgtttttcc[213 bp omitted]gaggtgggagaattgcttcaacccggaggcggaggttgcagtgagccgagattgtgccattgaactctagcctgggtgacagtgcgacgctatctcaaaaaaaaaaaaagattgtattcctcagccagacgtgatggctcacacctgtaatcccagcacttttgggaggccaaggtgggaggactgcttgaggccaggaggtcaaaaccaacctgggcaacatagtgggaccctatctctacaaaaaataaaaaattagctgggcatggtggtgcatacctacagtcccagctactcaaaaagcttagatgggaggatcacttgactccaggaggctgaggctgcagtgagctatgatcacaccactgcactccagcctgggcgacagagtgagaccctgtcttttattttttggcttatgtgtttttttgagatggagtatagctctgtccccaggctggagtgcagtggtgtgatcttggctcactgcaacctctgcctcccaggttcaagcgattctctgcttcagtctcctcacgcccggctaattttttgtattttaatagagacggggtttcacc[138 bp omitted]acacctgctccaacccttatccccaacaaggcaagtagtacaagcagtttcaagctgaaaggcagttccaggctggtgaggcctggggaaggggggatggtctcacaaccagaagctgacagtgagggtttgaactccatgggggaggttgggagaccaccgctccacagacatctggaatctgtgcatctatttgcgtgcatctgtgcacacacgcgtgtgtgtgggatctcaactgacagggcaatgggcgaggtcagtgatgagctgagaagcagggaaggcagagcgctagctggggcgagggaacctctgcacatgctcttatcggtgccaccctgggagcctccagggaatgcactacttttcttctcctgagtgagatgtggggaaaacagaacaaaacaaaaaatactgtttccatcttccctcagcagagctgagacaggctagaattttcaaaaggaattttcctacaacccaagaaaaaaccaaaagcgttattaagaatctcaagcagcactgggccttaggactctgcctagccctgttccagggttgtggctactccgggcccatctcaacagcatcccgcttggctgctctcaggatcgcttggctgctctcaggatccctgctctttcttttcttactcccttccttccaggacagggccagaactggggcctcagactcagattcagagtctagcatagtgcttggctcgatgcacaggcccagtaagggactgcggagtcaacaaggtggcaggcaaacgggcttgcctgttccggaaggatgcactcagcgctgcctcagtaaacatgactcagagacactaggccccgtccacgaacagaggagtgggaaaatggaatgtggtgtggccacatgctgtcatcctattttgcaggtaaaaaggaagaaactagatcattatgaatcaacacaggttggtcttaagcaaattagagatgatgtgtacgacgacatattctgtgtgtaaacaaatcatacaaaatattatgtacttatggtgatacatgaaaatgtaaaaatatttttttagtgtataaataatgtaaaagtataaaaaaaaggtcatccgtttggaaggagacccactaaacttccaacaatcctctgggtgtgggaagaggcctatgattcggggagaaagggaagtgaggtctggtcaaaggcaactttagctcttccatttccactcaaaggatctgtaatgttctaatttttcaaaaagaaaagtaggcttgaggagtaatcataatataattaatttcaaagtaatttttttttttttgagatgaagtctcgctctgttgcccaggctggagtgcaatggtgcgatcttggctcactacaacctctgcctcccaggttcaagtgattctcctgcctcagtctcccgagtagctgggattactggcacccgccaccacatccggctaatttttgtatttttagtagagacagggtttcaccgggttggtcaggctggtctcaaacttctgacctcaggtgatccacctgcctcggcttcccgaagtgctgggattacagtcgtgagccaccgcacccggcctatttcaaagtaatttttttttttgagacagaatctcgctctgtcacccaggctggagtgcagtggcgtgatctcggctcactgcaagctccacctcccaggttcacgccattctcctgcctcagcctccagagtagctgggactacaggcgcccgcatggtggcgggaga[142 bp omitted]gccgagaaagtaattttttaaaggagggaggaaagaaagaaccatctggcctggacacacggctgagtcagccctcacctgactgagcctgtgaccgcccctgtaaaaggtgggtgggtgagtgtcctcgcaggtgccagtcagccccggaggtttggggacccaaggttggtggcctcttgggcactgggtgcccacacagcacatctgcacctgcccatgccaagcctacttgccattctatcttcaaaagtcttgaccatgatgccctcaggcagtgaggtagccagcagcgccatctccttccgcactgtgctgaagaacttcttggcttctggaggctggaactcaattttcttaaaagaatgatttgctagaggggggaagagaatagtcagtccctcatggagaggccctggagctccatctgccaacctggctggacaggtgagcacacccacagacttcccactcgccgctgctggcctcagcactgtgaccacacagggaaatggtttgccctggggcagtagctggggtctggcgaggggactaaccaccctgcacccagatctggtgacacaaacaggagccccgagaaggcgggggaaggcgaagaccaggcaagggctgactcacagggtgcaaactccagtacggagaagacctcgcccttggcgctggtgaaggtgacgccaggcttgccgccacactgctggcacagcaccggggtttcgctgggccactcagccttcacaggtgactgcccctcgggcttgtcctccttgcgctctacgtcgggcactgcttccatcttctcctcctctacaatggccacattgtccagggtcttcttgaggttttcctgtagcttcttgatgtcatccagaaacttcttctcccgagttggcttctcaggctccacagtcggagaggtgggcgagcccgtcagcagctgctccacagtcatgttcttgaggctctccaggatcttgatggcctctttcaactcccggaagctcttgggtggcccgtccttgccagccttctccatcagcccggccatgggggcagccatggccacagccccctggacggcagctgtggctgcctcttcactgatcaccactcccttgtcctcaggggccaccggctgctccaggggtgggatggggggctcctctatcttggggtgctcgtcctccaccagcccattgtccgtctcccagctgtcactatcatcttcccattcatccgaggatgccccgctggtgctgccttctaccgaatcgtagtctgactcctcaatctcagactctatgttgtacaagtgctgggggcagaagggaagtgccagggtaagcagacaggaagtcacctccccaccactaaggaggagctctggggatccctgatccgcacagctgatggcgactgggctcatgaggccttggcaacctcattccaccctttccctgacctctgctctggcttttgcagtccctaggtctctgggagaggcccttcacctgtcccaccctccagctggacccaaagccccagccagtggtctgttccagcctctcctcctgctctgtgcacttcgtcagcatctgtccaaggcgttaggggaccttggcaggcccagtcccacacctgaaaagcgcagggtcagctaatgatgcagccaaggaggcctgtgtggggagctgggaacatatgacaagaggggacatgtagaagggccgacatatcctgctgcgttccctggaatggccgttaaggtgatggggcaagccattcccgcccccactcctgccccctgtgtggaccaggagaggagagctgggctgtgtggctccaaccaggaggcgagggaaggagagcccgtgtagcccttctgctcaggacccagcaggtggggctagaactgggtcggctctctcctttctctccttctctgttagagctttctaaaaagggtggtaggaaagtctccatctccttttaggagggaacttgcattcttcgtagcatagtgagctgacaatccaggaaaatcctggaggtttgtgaaagtctacatgcacccagagatggacgtgaagagattgctgggagaagcgaggctggtgggccaactgcaggcctgcaccaagggctgtgtggaatgcctgcctttcccctcacgctttcgctgagatctcaccaggaagacctgagagcccatcttctggctacacgcctgtggcccccggcccaagttgccatagtcacaagctcagcaggggggtcttgccagagcctcacctggggcaggatgatggtctttgagttgtcagcccacaccacctccaccttgctgctgacgtccacacgggccacctggcccaccgatggctgctgggcaaaggggacaaagtcagggggcccagctcaagctccagctccccagcccctcctgtgctctgcagtgactgacatcatgcccacctggcttgtgacaaggaacttagctcctctggtaaatgtaaccagcggcagctcaagaagcctgaccccagaagggaggcagggaaacaagtccttctgcagctgctagtgctgagcggcagcttgactctggggcagctgcccttctgaggacactgagcccagaggactttcaggtcttgtctcctagagccacctggtggcagcatcagggactgcagctggtgcacagggcagtgagcagccatccagaacttgaatttgaaggcgtacctcatcctccttgtgaggagccccatcctcagtattgccgatgcggatgacgatgtcagttgtacggaacctaaagtcagggtggtcagcaatgtcgtaaacactcacatcttcctcttctccaatcagctgtggcacaggacaggttgtcatgagctaggggtcctacacccaaccccagagcccacctgaagcaagcagtaggggctgcacacacctccacgtcgtccccactcggcctcagcttgaaccacttcaccatgcaggtacggccgatgtggtccccagactgtaccacaccgtagacagcagggtctggacagctctggactagggaaccagagaaagggaagtgactagctaagggatcccggctaaggagcccacatctcaagccagtgcagagtgcagaaccctgaccttcccccgtcttggaagtggtgagaccccttcatgagggcagtccccttctggacctcattttagctctgaccccagatccactgcccattctccacaagccccaacccgggccctcattggcgaccaccctgctggctgcccttccagagctggcactacctcgcttatctaccacgaagtctccagggcagaactcgttgttgtccaggtggtgcacagggaagaggtcgttggagcggatgttgcattccacggagccatcctgccacatcacgtcggctgaggtcatcgtggtcaccacctccactgccaccctgcgggtgcaggccagtcagcaggccatgcaaaccccaccccctccgcggaaagggcagagagtctttctgtcccttcctgtccctgtgggcttggtaacctgaaactctgaatcccaggttggcaggatgagtctctggtgcacaggaagctcacccagggttccaaggccacgcattctctgagaacaggatccacttgggagagctcaggcaaatgtggttccagaaggccaagcttaaggccaccaccatcccaccctctgcaccactcctcagtctctgctttccaccagggcctaccccaggcacctacgttgtctcgggtgggagccccggagccactacaaggcatgcagaggtgtgtgtgcgagcgcaggcacgcacaccgaggggacgcgcactctgcctggcttcacgctgacgccattggggaggggcacaactctgagtttacctgtcccctggcttgaagtctcgagtgattttattcttcttcctcttgtgtttgcgctttaagttcttgatggacaaggggatgctctttttgcgactcgtgccgctgccgctctgggaggaagtggtggagctggcagaggaggtcaccgaactggtgtcgtccgtgtcatcagcagcctcatcatctgcgtcctgctctgccgagtgcagcctgtcatctctgccttcttttagcaggaatgggggcagctgctctcctgcctcgtggggctcctctgcaccctcgtcctgcatctccactggactggcagagccatcgggcgtctcctcagggctggcagactccgcttcgctcttggttttggattcccccttcttgtctgggtcttccatggaatggtcccgggaacactgggtgtctggggagcatgacatgatccgcacaacctgcttcttcaacaggcgcttcacctgcaagggcggagcagagaggacagggctgtgaggtgcacctgggcaggcctggccctaggcatctcaggctggggggatgacagctgtatacacctgagtagccggcaagggtcatcagggctgccccccaaggcctaaagcacagactgtccttcttggccatggaaatggctcaaggccagttcctcaaatgcccaccaatccccaaccccaaggacataccttcttggccatagagccctccccctgggcgcagtttttttctggacattcccaggcaatcttggctggctctaccttggctgggaagacatacagacagcgctccccaagctgccgctgagcatggtcaaagcatccgagacgcttcaccctggttggggaagaagtgggggtgagctgggctggactcctgggaggccagcagtgttcttaagcctccccaggcatgtgaccagggcccagagccctgtcccacgcgtgcccctgggttgctggcagtaagggcatgcttacctgcctaggttttcctgggtgatgacagagggtggggggctgacgctgtccgtgccccctggacagaaactcttggtaatccatgtaactttcaactctacaacctgcacctggggatggcaggtgggacacgccagtcagggcaggctctgacagcactctctttagccagctgcccaaagcccacttgacctccagagcaggaaactgatcttcctagtgcagcaccaagtacagacacatcagagcaggccccaactgtaaccacggcccccacccaatgcccaggaccagtgtcactgctcataccagccaggggccactggaactgccacttgccaccctcccaccttgctcagcctgtacaggctgggctggggcacatctgtcttttggtcactatgaccagagcctgggttccctttatccccaaagccctttgagatcaacagggtccagatgctgaggagcggggctcaaccctcaagagcaggaaggaaaggggcagcagctcagctccagggtgtggaggtcaaggactccatctcctacccttgggcccggacccacctcttccaccaccactcggaacttgctcttggtgctgagcacgggcttgacacctgacagccactggacgctggagaagatcttggcagggccaatgagcacctggcctgggtagaagccataggaatcatcgaagaagagaccctgcgggatgtggggccaaaggaaagtccccgtgagcggtgtctccatgggtgaccatgctctccacgcctgtgcccgctggctgcccacctgcagaagcccactcacacacacgccccacacgccctaaaacaagtcctgtggctccacatcagcacttcccaaaccctgggtccgcagaggtcatctggcgcccttgttcaaacataggtgatgcattccatgctccttggtcaagggctcatactctgaggaataagactccagagagcagtggtcctgaaacctgtttgctcacgcaccccctgtatatctacttgtttgctgtgtgtgtccatgtactattgtaactaacacatcatcctgtactgagagagacaaagtggaaccttaaaggatg[139 bp omitted]ggtgaaacctcatctccactaaaaatacaaaaattagacgggtgtggtggcacacgcctgtaatcccagctactcgggaggctgaggccaaagaatcacttgaacccgggaggtgga[135 bp omitted]cccgccccttttctaggaaaccgctctgtttagctgggtccaggtctttgctacgaagtcctccttccagaggactgagcaatcagagaagggtgctggcctggatggagcacactaccgagtcgctgacgtgcgggcagacgtcgtagagcttggcgccatcttccgtgttcatggagcacctaaaacagagaacagaggtttggtctccaccaggggacacagtgagtaccaaaaagttgcgattctgagatgccaatgcgcccacatgccctaaatagcacaattcgtcttctaccatcaactcagcccgaggtagtacaagaaactctcccacaacgaacaagaccccaagtgccactggagtgcttgctcagcaccatcacagtgcctcaagtaaagcatcagcctctagcagatatcctcagtgaaaacgtttctccccatgccaggacagatcagaaactgagcaacagaaataggccacggcagataaggagaacggtacagggttaggccctggatgcctgcaacatctgtcactgcccttgatcaaacctgtcatcactgtccccaggaggaaacaccctcctcctcccctctttccaagaggctatccttcccaagccgatggctctctggtggtgagactctacctggcgccgttggatagcttcaggatgatctggttcttcaagtcgtagaccttccccagccagcagtcataggcaatgtagtccccatacatgaagggctgcagaccaaggaggcaggggcagtgagacacagcagacaacgttcatgtccagggcacagattcctctatgccccaccgaagacaggatgggggaggatctagacagctcactgactggaccggttggctactagccctaaacagctgctgcagcaggccctccctacaagttctaggctgcatcccagctgctcttcccagtgaggaggaagtggtggtggtggtggggctgcctggagggaacggggtgggtgatgcaggggcagagaggcctgatggcatccatggacatgggacatccatggacacaggacacctggcaaagtaggctgtggaggtggcaggcagaggaggcagccacaccactggggggtggctacatggacagtgctctgagtaaatacgttaacacatcaaggatatcgagagccaagtccctcattgttggagaaggtgcccaggtgtttactaacagaaagggagcaggaaggagaagaaggaagaggagtctgaggtgtttaggtggaagtggatctatcaggatgaactcatatattttattttactttattattattttttttagagacagggtcttgctctattgcccaggctggagtgcaatggtgtgatcttggcttaatgcaacctccatctttgggctcaagcgactctcccacctcagtcttctgagtagctgggactacaggcatgcatcaccgtgcctggccaattttttcatatattttggttgagatggggtttcgccatgttgcccaagctggtcttaaactcttgagctcaagtgatccatctgcctcagcctctcaaagtgttgggattacaggggtgagccactgcgcccgtgaactctgcctgaactcatatattttaatatacacatagagcaggtagtgacatatttagatgtgtgtatacatataatacatatgtatttcctagtgtgtcccaaaagagccaagtagcaattagcacacctagcatccagatcttgggttttaaaaataccattctctgaaaacaatgaggcttcttggagaaatggttgattctggggctggatcacaaaaagtacaagatgagcctggcacatctcatgccagaaagaaagaaagttcttaaaaaaccaacaaaaagggccatgtgagaaggacatgaaagccagcttgaaggggttcccactggctaaatctgggaccatccaagcaacagaacagataatagtagtaattaattataaccaatgaataaaacagaaatctctaagtccatactgataaaaaaaaagaatacataaatagggcagaagataaagctcttctacagagcagaatgccagctaaaagaaatgaggggaacaagggagtcatagaaccaccatttagcaacatcagagcaatggctggcgcagggggaactgtgaatggaggccaaagctggtggatttcagtttgacaaatgacaggttatagacataatctgggactacgttcccacaaaatacaatcacttaaagggggtaaatggtgagtttatggtggagagacctggtggacaccaacatgaccaggggtaaaagtgaacaaccccagcactttggctatggggtaccatgaaccagggcagagctctgcggcgggcctgccaagaacacgtgggcatgaggcaacaccaggaagacccaggctgagggtcaaattactgaatgtatcactgttcagggcatggaagacaaagaaaggctgggaagcgattccagattggagagaaaatgaagagatgacaactcaatgcaagatgtgttcctgaattgggtcctggatccgcaaagaagaaaagagtagtgttgggacaactgcatgtggtctgtggactggacagtaattatcaacgttgatttcccaatctgggggttatatggtggttgcacaggaggctgtcctcatttttggaaaacacacaagaggtgtgtgtattccggggtgggtgacagggcatcacatctatagcttgctgtcaaatgttttgggaagaaaaaagaccggagggggatctcggggaaaaggagggagggaaggtgatggagcaaacgaagtgaaatcttaacagctgaggaacctggatggagggacacaggaatttacaacttttggtaagtttgaaatcattaaaaaaataaactatttccaataatttatttttttaaagaaatgttagaggagaaaggaaaaacacttaaagataaccacactggcagcctatgctggggttggggaagggcacgtcctgacctcatgtctaaatggcttacttgaaagcagcgaaaacaaggctacaggagccagctggctgctgtgctccgccttctgacccaggaaggctgtgcttggcaagagcacggaggaggctgtagcccagaggtcgtgccgccgagagaaccagagggcccagaaaggatgatgagaagacagggccggctcacccagatgtgctgcaggtccttgctgttgacgggatagatgatgcagttggtgccgatgagcttgacggcacagtcgatgttgacgtcgatcaccgtgccacactgactgtcctgggggagggaggagacatgcaagtcccgtggtgcagcagccctggtcaccaggggagacccagcccaggcaaccccagcgcaccccctgcagagctggccagttctcccacatgcagagtgcgaggtgggcaggctcaagtccctaaggtggctgcccccaggcccggggctggggtggggacgcaggactcacggtggatcgcatgtgccggaccacatctcggggcaccacagaacggtcctctagtttcagctgtaaaagaaaatacaggtgtgagagaatggactctgaagccaccacagaatacagttttcttccagcttctgaaggaaagcgtcacatccacactgctaagtgcacaaatcctaagcgtttggctagcagtatcttcacagaccgcacacacctccgaccagcacccagacccacaggcagagcgcgtcacgcccacaggcctcctggggcccctgtggtcactgtctcacccaccagaggcacttggcttgccggaggtagccttcctcacactgaacagtgcagctcaatgacagatcacataaggctgcactttaatgaaggatttaacagcccattctacagagagcaaaacatttgctttgcgttcaatcttttttctgccctctgcaagtgcctgccctagctgatcagtgctgagggagagtgggctgggggagaagcaggacactgggctgcggtgggtcaccctgaagcctggctatcaccggacaccatgttctaatctgggttatcctcctgaccagctgcggcctgcaccttatctgctgcgcttggagccctgcaggctgctaagtaaccctcaggatggttggctcttggagcccggccaactgcacgagcacctgattgtctctttacgcacagctggcagcggccactgcctcctgctgctccatcgcccaaaagcccaggcacgtgatgctcccaccaggccagcctgcgtcttttttagctggttcctcaaacctggggcagctcctctatggttcttcactgggtcataatcatggatgggtctctgtgtgtgtccacctccgagaccccaaaccacatggctggagagctgtttcctcaaatagccaaccagacactcctccgtggtggcctctcttgacctgggggcactgagaggtcaccaccaagaaaggagaactgagtcgccgaaaaaggaagatactggctcaaggtcacttaaatgctggcaatgacaactaaaacaaactctgctagtagaagaacgtgactcacaaaaaaaaaaaggaaagaaaagcaatgaaccccaccaccaaccagcagtgcagagagtcccatgggaactcatgagcccaagttgtttttttttttttttttttttttttgagatggagtctcgctgtgttgcccaaactggagtgcaatggcgcagtctcggctcgctgcaaccttcgcctcccaggttcaagcaattctcccgtctcagcctcccgagtaggtgggactgcaggcacgtgccaccacgcccggctaatttttgtatttttagtagagatggggcttcacca[136 bp omitted]cgcagggttcttgagtcagacacaggaacgtcaggcaaaccactcctgccgacatgtggaaggagagatgatggcagctgtctcagcatggctgaggtggagtcaccaaggcagcggaccgcaggtggcacatggtgcacggtacagagtaggtgctcagcaaggtcggcagctgtgatcactggccctgtgagctgcagggtgaagacccctgaaaggtcaggctctccttatctctgctccaagaccccaggaggctggagaggcatgctggcgtgacggtgccacttttctaaatcaaagaatattctgtgcctgtaaccctctgtgcccaaatctccactctgagatacggcatttttttgtgctgccccaccctatcttaatcccctgctcccattttagacttcaaaaagccacaattgctcccagagaagccagaagcggcaggacaggagaatccaatgcaaggggggctgcaccatgtgtggcaggagggctgcctccaccacttgggggtccctgagagagcagccaggaaaggaggagagaagaacgcagacacagacctaaatcagtgccgtcactgatgaaacaccctgttcagcctaacagcacccttgggagtgcaggggaaaccgaggtgtcaactctgaggctgaagcagaaaaaaacagctggtgaaagctggcatcatggcaaggccagaggctggcagggcaggcagtgcccagtgctcccaggagagggaggctggcagcaaatgccattcttcccgtggggtctccagacaacagcagctccacctcaccaggatgctgcctccaggggctcttctgacctttctatgacaaggagttacatttctccaaagacctgatggtgctgggagcagagtgggagcgacaaggggctgggggatggtaacatggtggctacactcccttccactgggaattagaacccaagacaacggcatgtggaaggacttaggatgacttgggaggctcttgtgactttccttcctaacttcctataccccacccatactgggcactggctttctccaaataagcccataccctcccatctgtgagccactccactgaacagttacttccaaatgtcctcctctccctgcccccgtatgcacaacctgcttcacaaagcctttcagtgcccccgtcaggaaggaaccgacgtgctcctggcgaatgcaagagctctggagtttttcgcctcatgctaaccaggtgcttcctacctggcagacagttctccaagcgtttcactgtcttcgcccatgaggtgctccacaacccatgaagcacatcactgccatgctcattttgcagatacgcaaactgagaccaagagaaaataagcaactcattcaatgtcacaagtagtggagctgggacctgaacgcaggcagtttggctccagagtccattctcttaaccaaataaaaagctcatctctccccagagctacagagacagggaaagacttctggcaggtctacacatttaaagacagtgattcttctgcttatgaaagaaagaaaaactctcttcatttctgaggcaagtggaaggcagcaatggtggccactgactgcggatgcctgctaggcacagtttgccctccacttccccttctacctccaaagagcaaatgacaggtgccagccggcctggcaggtgaacactagagggcactgtgcccactctgggaaagcaccagatttgtgaacaaaactaaaccttggaataaacccaatccctactgttaaggggtgccctgcttgtagtttaaaaaaaaattgttactaggaggggatctggggtcgggggtgaagagatttcaactgtcctcatgggctctgaaattctaaacaacctcagagttggtgagctatttattgtctaacatttcttttttttttttgagatggagtctcactctctggcccaggctggagtgcagtggcgcgatctcggctcactgcaagctccgcctcccgggttcacgccatcctcctgcctcagcctcctgagtagctgggactacaggcgcccgccaccacgcccggctaattttttgtattttcagtagagacggggtt[145 bp omitted]gaacagaaaaaggacaagacaagatgccaaaatgctaacagtgtctctaagccagaaggggtggtggctggtttaaaatgaacacacactactttttttttttttgagacagagtctcgctttgtcgcccaggttggagtgcagtggcacgacctcagctcactgcaacctccgcctctggggttcaagtgattctcctgcctcagcctcctgagtagtgggattacaggcatgcacaaccatgcccggctaatttttgtatttctagtagagatggagtttcacca[139 bp omitted]gcccagtggaacccaggaccgacatcctctgtgcctcctctggaaacaggagcagcaaacaacacagttgccctccgaggagagggattctggcacatgctaagcgcccattctcctgcaggggggatgcagacagacagacgcagagaaggtggtaccaagtgccatgaagaaaaactaggccacatgggggccagcagagggagagcacagtgaagaattttaaatgtgtggtcaggaaaggcccctccgaggtgatgctgaaccagagatcgggatgagatggggaatgagcttaccaagcagggaggagtagctgtcaaggtgctgggtggggtgactggcacaggccggcaaggcttcaagaaggcagaaggcatggtgctgttattcaggccttagagagccacagggagggcttgagattctatcctgagcaagatggaagcccctgaaggcctccactcagagccctgcctgatggtgatatccaaaacattacctgatttttgggcagggaacgtgctgagagagggagcacggaggctggttagcccagtggttctcacctaggggtaattttgctcctcaaaggacatttggcaatgtctggagacactttcggtggtcataaagggtggtgggggttctggtatctagtgggcagaggccagaatgctgagcatctaacaacgcacaggacatccctcaacgaagaatggcgtggccaacgcacccgcagtgccacagctgagaagccctgaaggtgctctggagacgcaggtgctgagacccgaacaatggcagagaaggtgggtctgcggaccagcctctggatacatcaagtaggaaagcaatcaaatggtaagtgaggggtcagggacaatgccagggcagagggcaacgtggcaggaggctgggcacttctgttgtgccccatttgagctccccgaagctatgctgggggccactcagagcaggcattcaggagccggggaagctcaccgggggcctctcctgccaggagcactctccctccacggctgcctgactcccaaggcacatgctgcttctctgagctgcagtcttgaggctgacccccaataacacagcaaaagcaactagctcgtcctgcagctcctggtccagactctcattcataacactgaccttgactgaccaggtggaatccaaattcactgtataaagtgatccaggaatagaaaacacaaactgaggctgatcaacatgttgaaaatacaaagacgctaaataaagaagctacttttttttggtgtggtgggggagggggtgggtgggaagaacagagtttcactctgtcgcccaggctggagtgcaatcatggctccatcttccaggtaatactcccacctgtctcctgaatagctgggactacaggcgtacgccaccatgcttggctaatttttgtaattttttgtagagaaagggttttgccatgttacccaggctggtctcaaattcctgggctgaagcaatcctcctgccaccaaagtgttgggattacaggtgtgagccgctccacctggccaagaagctactttcaagtgattttgattgtcatgtccctgtaggagcggatggctcctaaaggctgggctgctcctggaggccatgcccttgccccaagggaaaaggcggctttgtgcctggccactagcaccagcatttgaacactaaatgggctcccagttcaaaaaggggagctggaagaagtccaaaagcaggggcctgcatggagcctaagcacttacagctcaaggctggaagccaccagccatgccacagtcatctccaggtgtcagacaccagggaaggccaaacaggacgagacatgggtgctctcttttaatcccggggtaaaaggcaaccccaccgcttctggaggttagtgatgtaatcaataccagattttttcttttttttcttgagacagggtctcactctgccacccaggttggagggcagtggcgcaagcagggttcactgcagcctcaaccacctgggctcaagtaatccttctgcctcagcctcctgagtagctgggactacaggcacatgccaccacccggctaattttattttttttgtagagactgggttttaccatg[136 bp omitted]aaacagaaaaggtccagcatcatgccaagtgcccgctgaggcttcacagacagcctgggacctcaaggacaagcggacgaccagccccacactaggtccctggtgagtgtgtagacaacaggtcagcttgcaatggctcctggatttgtgttcaaagagtgaggctttccctttgtaggactaagccagaccctagacctctgaaggtccagcagccacacacaggactgaagctgttgacctaggccaggactcaaagaccagattcctaaaaggaagatgaggttagaccagcactggaaacttctaaattccaacttgatacttcccaaagagtaaaaacaatctgagaaacgccactcctccaccccctccctgaccccccatctcttattgtctgagctgggtctgagtcctaggtgtatagaaaaagagtgaacttgacagtggccaactgggggtgtgggagagacagagcttccaattgtgctggggacctcaggggctcctaaccagcctctctccctcccctcctgtctcagctgaggcctctctggctctttggttgtccctgagcttgaagggtctagctccacgctgccatgtgcccactccactgccagcacaggtgtggcgccactatagttcaagacaggggtcacgtgtgttagtgcatatatatttttcaaactaagaaaaccaactcggccgggcgcagtggctcaagcctgtaatcccagtgctttggaaggctgaggcagacagatcacaaggtcaggagttcgagaccagcctggccaacacggtgaaaccccgtctctattaaaaatacaaaaattacctgggcgtggtggtgggcacctgtaatcccagctacttgggaggctgaggcaggagaatcgtttgaacccgggaggcggaggttgcagtgagccgagattgcgccattgcactccagcctaggtgactggaagacagggcaagactctgtctcaaaaacaaaacaaaacaaaatgaaacaaaaaaacccaactcagttttgcgggggtggaagcaggaaaccttgctgaggcctaggatcccacttttttagtgattcctatatattcaaggctagacaagaatacaaacataaaataaggtacacatatggtctttaaagattttgcaagaatctgacgtagggatggggtggaggaagtaaggaccagtgacattcacccccatcccacaatgttaatgcagcttgatggcctgagaagctacttacaccagattggaaagtttatcccagtgtggatttctgaaaaagctgcggaaatcgtagaatggcatattccccaaagcagcactttttttcaaaccatgtgttgtgacccattagtgggttatagaaccaatttagtgggtcatggtcaacactggacaaaaaaaaacctgagtgcattaatatacatgtggtaagaataagtactattaggttggcaaaaagtaactgcagttaaaatattttgaaaaaacccgttcagttgcatatataacacgtatgtgtcccgggtcatgatataaaatgtgtattttaccgtgagtgactgctgagaagctggagaatctccactctactgaattctctgcccagcacctgcgccgactctcggtcctttctggccaggcttcagggcagttacatcagagggaggacatccctctcatgagaagctggtcttggaaccaaaaaacatgcaaaccaacacaaaacccaagacccacacagtcacactcaggcacttttagggtgaggaactttaactttctgacctgacttaaaatgttactaaattggctcaaacagtaaaaccaggagaggcagaaaatggggcctcctgttggagctggactcctcttccagcttcttcctaagcccgagtttccagtttggactggatttgaggatgtgaatggtcagtaattccggctggtgccagtgtaaggactttctcagagcagttgaccatcatgtggctgagccctgataacccggcaatcagctcactgcccacctgaggacagaaggttttaccagcaaagcacaaatggccagggggcctcacatgcttgggggaggggagggagaacctccggaaatggctggaagtaaaagaaatgttggtgcccctagctggaaaattctgtcaatcatgagctacggaagccattcaacagagaagctgtgctaagactgaggtcaactgattgaatagtttttgagtgttttctatagacttaagacaagacaagaatacaaatatataattaagaatgggaattagctttctagaacttacactgagatgagggaggtaagatgaaattacacctgaaaacagttatacacaagtaaatagagcactaagctgggtggggagaccagaaactgagtcctgtctggatggcggtgggggaaggcaggaggaccggggttgcaggggaactgcacaccagggacagcccccacgccctcacccctgacaccctctctgatctcacaacgcagactctcaggctgggcaatacagtgctgctgcatcaccgcctggaaactcggctgcagctcgccagcttgctggaatggcctggaggcacagcctgcccgagggacagagaaaggggactgagtccaactgcctgctaagtgagggggaaggactgcagagcttggcctggcagggggccagcgggctggtctctgcagatgctgcggtgtttgataagcaatatgtgcacttggcggcaggagctgggagccgaggagcccagccctgcacccctctgtcttggctctgggcttgtcaacctggcttaaaaaaagacaagaacagcccaggcctggctcctgcatttgaagggaggggacagatgggcatctttaggagaaggccgcctccttcctcaaaagtataagtagaaggcagaaaagtgatcagcatgattccatgttctgttcttgtcaggcctgactgggtatcactacctaaccagtggccccggactgctccatttcagatgcgacaggctgcggtcctgtggctgccgggcatccctgagaacaagaagggagtcggccagctggccaggcacagagcaagttcacagcctcaacacccctcagtgtctgatgccatgttagttcacggaatgaggacccaggctgctaatcacacaaactgatcctgacggagcctgccaggaaagaaccccacgtgcactgcctctcccaaccctatgacccccacgaaggaggcaccactcttgttctcattccacaggagactgggtggcttggagaagtaagtgagctgcctaaggtcacccaagtgccaggactccagagcctttgttttgctcacctgcccttcctcatttgacctgtctggtctccaagcatggcccttgctacacctggaccaattggaaccatgctgccattcaagtgtggccctgggcctggcgaggtggctcacacctgtaatcccagcactttgagagggcaaggcggttggatcacttgaggtcaggagttgcagaccagcctggccaacatggtgaaacctggtctctactaaaaatacaaaaatcagctgggtgtggtggtgcgcacctgtaatcccagctacttaggaggccgaggtaggagaattgcttggacccaggaggtggagtttgagtgagctgagatcacgccactgcactccagcttgggcaacagagcaagactgtgtgtgtgtgtgtgtgtgtgtgtgtgtgtgtgcatacacatatatgtatatacaaatatatatacatacatgtatatacaaatatatgtacatacacgtatatacaaatatatacacatgcacatacacgtatatacgtatgcgtatacatatgcacatacacgtatatacgtatgcgtatacatatgcacatacacgtatatacgtatgtgtatacatatgtacacacacgtatatatgtgtgtgtacatatgtacatacacgtatatacgtatgtgtatacatatgtacatacatgtatatgcgtatgtgtatacatatatacatatatgtgcgtgtatagatatataaagtgtggctttatatacacatacgtgtgtgtgtgtatatgtatatgtgtatatgtgtgtgtatatgtatgtatatgtatatgtgtatatatgtgtgtatatgtatgtatatgtatatatataaagcatggccctggactggcagcccagcatcttccctgagcttgctggaaacgcagactctcaggccccatcccagacctgctgcctgggaatcatctgaaaaagttccccaaatgattctgatgcacaccccccagagaaacagctaaaagggactgcatccctctgagctgcttctgggaaaatttgggggaaacagcggtgttcccctgtagctatgctccccaggagaagaggagccctggaggggctgtgtccaagaagtggggcagggcctgctctcagccatgacagaccgcacgtggaagagacacaacctccctgagcccacaccaacctccccgcgcttctcaaacacctgcagttactatttcaaggcagatgaaatgaataccatcccgggatgctggcatcactgggacaccagctggcctggagagtgggagttgaccaaaatgtcacttcttggctgggtcattaggtcctaagaccctcaactgcccacctttgcacctccatctctcccaaggcacaacagcaacaagcagctcatctcaggacagtgaaacaggactcaaatactaactagaacagcaccatcatggagactgggaggagtttctgcccaattctgcaggtgcagtgagacaaagctgcggctggtcacatggaggctacacactgcaggggacagagatgtggagtataagcttcagggcacagggaccaggtcctgcaggggccacagagttgccactccccagctgtgtgtgctggagtcatgtcacatctctgggcaccagatgcctcatcagggggttgggcaacactgagctgaatgagctccaggcccttccggctacagctccagagcttgtcccctaaacacctcctggggtcctgatttccacctgcctggcacctctccctgactcaggggcaggcttctgctcttcacatgtgggcacccccattgaccatcagagcaggccagccgaaagtcaacgacatccctgggcagcatggcccaaggaggcccccatggctggggcaccagggcaggtccctagacgaggacctcttccctggagaagacgataacatttacaaagaacagaacacaatgcaaaatttcatgtatgggcacatcaggatttaaatgtattattacagtgaggggattttagatacaccaggagagctatctgaagagaaccaacaggaaatcttagagtattaaccacctccttgttaatatggtcaaaattctctaccccctcctttttatgagtgtggacacacccaccaccagtgataagaggacatggatggaggccaaatgagagtgcactgggtggctgaactgagctgggtctttagaggccatcactaaaaccacctggcagagagcaccacgaagggccttcgactacaggaggaaagaatgctaagcatgtccaggggcaggaaacagctattgcaggcccaggcgagacaggaggaagggaagaggagcaggtgtttgatgctgcatggatgcatcagcgtccgcgaagagacgtctgggtgaagagatgaatgtctcactgcacctgcagaattgggcagaaactcctcccagtctccatgatggtgctgtttccgctggtatttgagtcctggctcactgcatttagaggagctgcttgctgctgttgtgccttgggagaagtggaggtggagaagtgggcagatgaggttcaatgctcttcaccacctcaggaggaaggcgcagggggaggtcacagagctgggacacgtggagtgggcctacacccagtcccaccctggggtctgggatagctgccccacactgccctgggacgccctgaagaagggataatagagaacagacaccaacatgtgagacctggaacctcagccttctgacaatgttttctatactattaggcaaaaaacttccctcttctaggagcccacagcctcccggagggctctccaggcctcacacaaaaactcattttatcacagtcctgaaggaggtacacaattcctgaaagtaacagactaaactgtacttggactataggacaccctcttccaggagccatgccttacaaccagcaactgcgaggcgccatttggctgtctgcaccctgtgctggcctctgaagggcaatggtggaagccaacagttggaggaagtttagatattcaattcagcagtgctgaaagcaaaagaccatgaagctgtggaaaatggagcagcctccacaggtcccttggaaggaggaacaggttttttttttttttttttgagacggagtctcgctctgtcacccaggctggagtgcagtggcgcgatctcggctcactgcaagctccacctcctgggttcacgccattctcctgcctcagcctcctgagtagctgggactacaggcacccgccaccacgcccggctaactttttgtatttttagtagagacagggtttca[142 bp omitted]ggatttttcaacccaaacccattgaataaatttctgggtggagagattaatgttccctaggtgaatctgatagttaaaacagttcaacttctgactgccacggtgactcgcgctgtaataccagtactttgagaggctgagctttgagaatcacttaagcccaggagttcgagaaccagcctgggcaacctagtgagaccctatctctacagattttttttttttaaattaggcctggtggctcatgctcatggtctcagctacttggggggctctggtgagaggatcacttgagcccagggggtcaaggctgcagtgagccacgatcgcaccactgcactctggcctgggtgacagagtaagaccctatctcaaaaaaaaaaaaaaaaaaaaaaaaatccctttctcctgaaacaaaatatactctgactacttaggaatatttgtctttaattaaaaaaagtttttaagtttactgctgatatgggggtgtaatgaagaaaaaaatagaaaaaacattttaagttaaatccagggatcaaggcgtaaaagcaaggtgactgaaaataactaagaaagcgagagttgactgatgcccacccttcggcactccctgacacacccttcctgtggtccagcccttgggaaagacacagaggcaccaggtcctcaaactgatatggccccaaccttgacccacctctgctcaggtggtccagatcccagcctgggccagtttccatgctgacaagaacaaggccccgggccagttgctgtcacagtggcaaagagcagatcccgccagcacgcatccttgggaacctggtggacatggtttcgccaccttgaagacttccaggcaggaaggccatgctgtggccctgagaacccgatgctcagagctgtgactagaagggagcgagctggtgtgaaagcgtggctctacccacgcggaaacctcagagtctgagaaagaagcatgccggcagaaggaggcatgcctgcttggccccattcctcggccatggccctcgggaccctggtgctccctgcccctccttcatcacctccctgcaactgcgaatgcacagaagcatgacataaccttggggcagcagaaagctgctgcctcactcctgccacagctcatgatccggagcctcacccctacccagcgcagcagtggcccccttcgcaccacactcccccaaatgccaagccttggctgctaatcaacagccacactctgaaaatgcaccgtaccttcctaggcagactcatgctgaaaaggagccactcagcagtgctatttttaaaaatgcaaatatggtaggaaaaggcagtaaaaataacacacaagagccctgatccaaggccagttgtttccccgggggccaagttcccactgaagtgggagcagggggctatggaggagcagggggctatggaagtgcaggggggcctatcttcccacagtggtcctggcttcctgcatcgttttgttttcctaatacctgtgattttagatcaatcccagtggccagaaatgttacagactcgcccacatctttacccaaacacaccaccgagcaaccctacatgcaggccaggagaacctacactagaggcactggcaggtttcatgacccaccctggaatgactatgtcaaaacaatgatgattctccactccttacaactctgtaactacatctttgcgagacaaactgggctggggcgctgcagacatttctttttcacagagaagcaggagcttgataaaggcatgggaagccaaggaggaagagacacaagacgtcctgggatcgagtgcaagctggggtcttgcaccaccaggtgttggtcctgccagcattcaaaatcggcctgccacacactgtttatgtctgtggccacagaaagcccgagacaggctgaccccagtgagttggcagggacggccttgtcactcacccccctagacttccaaatgctaaccttgacagtaggagtcctccctttcttcagccccccacatccctgcaattaggtcaggacaggatcaggtagtctgctttctaagccaagatttccaacaaaaataaatacaaacacatagcagcatgtatttgggctgagttcctggtaaaaggcatggatgggaaagtgaacaggactcagcaccacccatttgctaagtgggtgcagtccatcagtactgcagacttcgctccaaaaggccgttgctcctctgacaggaaatgggaaactcacagctacagtgagctccctagagctgagcccaaccgtagggaaacactgcagaaagaagtgacggcctgctgtcagcgctcatggctgacaccacatggtcaccattcttccagatactgaaacactggagtcacccacattaaagacactagagcatggaacataatttgagtgactattttcttttgtctttttttttttgagacggagtttcgctcttgttgcccaggctggagtgcaatggcgtgatctcggcacaccatagcctgcttccccggttcaagcgattgtcctgcctcagcctcacaagtagctgggattacaggcatgtgccaccacgcccaactaattttgtatttttagtagagatggggtttctccatgttggtcaggctggtcttgaacttccgacctcaggtgatccgcccaccttggcctcccaaggtgctaggattacaggcgtgagccaccacgcccggccctgagtgactattttctattttcccagggatggagtaattagcaccatttgagatccattacaactggtaactgatgccttgggactgctggctgagaagggcttgtggcctttctttcatggagtaaatgccacgtgcttcccatttctcccatcctggctggctctatttccctcagtcactgggtcccaggaggaagtcaacaagtcgctggccaggagtctggaaaagacaagatgacgccaccagactgcatctgaggacccatcccctctccaatggatctgcatccagagtgctcaaggaccacaaatcccaggtggaggaaaatgggaagatggagatgtctcaaaggatctgctgtgtccttcctttaagggacaaccaagccacaggagggtcaggcaggcctgtggtgatgtttttgagacctctatgtgtgataagtaatgggacgtgtgctaagtaaccccaaaatgctagttctcgtggcctctctctccggcttttcctcaatggctcccaactatttcagtcactccactcattcacagcctgagtggtcctgaaagggaagatgatgtgtggaagcacgacctaaatgaacaacacggggagagggcatgggcaaagggcggctcactttaacctggcttttcccaggctgagctcaagtcccatctctcctccagcaagggcttgacacagacacaacctgctctgtcataaggtctgggcacccagtggcctcttcctcccgttcatcatatgctgtagaccatccattcagttgttccctcgcccattcagcaaactgaataaccactgggtgggcagacgctgtgccagatgccaatgaaacatctggaacacgagacagtcctgcaggtgtccgagcaggacggaggttccatctgcaatgaagccgaggcacgccaggcttggggaggtgtggccaccacagggaacagccatggctcaaatgttcccccagatagctgcacccaagtttctgctcagatgtcacctcctcagaagggcttctctggccaccctgtctggaattgctcctcctcattctctatccacctgctttatttttcttcacagcacttactgttcccacacctgcagtctgtgtgccccatgggggttagaatgtgaaccacacaagggcaggcactgggcaccagtgcaccccagcaagtgcctggaacacagaagggtgcctctgaggagtcactagagacagctgaaggaaaagccatgggaattgggaacaagtgtcaagaaaggagtggctagcaatgcctgatgctgctgagagatccagtgccacggggaagtgtccctgctgacctgggctcagcagtcccaatgggtggcgtgggcagaatccccaatggcggggcctggagaacatctggcaatgcaggaaacaggaatcacagcatggagctcattcaggaactacggctgaagagcaggaaaaggaggaagaggtaggtgagggggtggatgtgggctgaggaagggtctcttttcaagacattaaaaatggggtcaagctgggcacggtggtacgcacctggagccccagctactcaagaggctgaggtgggaggattgcttaagcccaggaattcgacgctgcagtgagccctgattgtgccaatgcactccagcctgggtgacaagagtaagaccctatctctaaaaaataaatacagtaaaaataaaaatgagggcccggcgtggtggctcatgcctgtaatcccagcacttcgggaggccgaggtgggaggatcatgaggtcagaagatcaagaccatcctggctaacatggtgaaacccagtctctactaaaaatacaaaaaattagccaggcatggtggcacgtacctatagtcccagctacttggggggctgaggcaggaaaatcgcttgaacctgggaggcggagcttgcagtgagccgagatcacaacactgcactccagcctgggtgacagagggacactccatctcaaaataaataaataaataaataaataaataaataaaaaataaggtcaggcaggaagctgccaagggagagcctgaagattcaggcccaggacataattgatagaggtggcctacggcacagtgtccgcaaaggaaccagaacacaggagaggagacttcctctcttcacaccaggtggctctcagctacttccaggttgggttctttttttttttttttttttttttgagacggagtctcgctctgtcacccaggctgtagtgctagtgcagcggcgcgatcttggctcactgcaagctccacctcccaagttcacgccgttctcctgcctc[225 bp omitted]ccagcctggagtgcaatggcacaacctaggctcactgcaacctctgtctcccaggttcaagcgattctcctgtctcagcctccccagtagctgggattacaagtgtgagccaccacactctgctaattttttgtatttttgtagagacagggtttcaccata[131 bp omitted]tggtatcttggatatatactgagttaaataaaacattaaaattaatttctggctgagtgaggtggctcatgtctgtaattccagcactttgggaagccaaggtgggaggattgcttgaggccaggagttcaagaccagcctgggcaacagagtaagaccctatctctacataaaaaaatggcagcaggatcccttaagccaggtgtttgaggttacaatgagctatgatcgagccactgcactccagcccgggcaacagagcaagactccatccacctctacctccaaaattaatttcacctgtttctttttttttttttattttttattttttttttttgagacagagtctcgccctcaccctgtcacccaggctggagtgcagtggcgcgatctcagctcactgcaagctccgcctcccaggttcatgccattctcctgcctcagcctcccgagtagctgggactacaggcacccgccacc[190 bp omitted]tcctttcgacaaaaaaaaaaaaaaaaaaaaaaaaagtaaaagaaaaaaatgtggtcactaaaaaattttaaaggacctacttggctcatattgtatttttttaaataatagtttagcttaattgtatcaaaacaatgcatgcctaagttaaaaaaaaaacatagtactaaaaggcttaacaaaaacaggcagtcccccatcttaccctctcaactgtgctcttttgaagcaaatactttttaattttttagctgtttgaatatttacctccatacatataaacaacatgcttgcaccctaattcctaacttattatagacattatctattgacgtcctgttttggtacctgatgacctaactcttaccctcccctctgaagccctttgcctgtactccatcctttcaacagttccactgcattaattgaaaaatctaaatgtgttatgatggaggacagagctcacagctgaaccaagtggtgttccgtgtcctcacacaactatgtacatattgatacttttgtcaaatacctatccataacttttctaaatatcttcaaattacctacaaattatcgatcaggtatctttgggctttgtgtctttttcttgtcgatctctctccctcctgcagaattccatcctgtctctctaactcagactttcctctgccgctcacctgtgtcagatcccgtttcctggatcctgggaaaagtccctggttttggtgaagaacaactccttctatctcctccccacaagaggttcacaggaggcactttttttccagcccttacatgcctaaaaggagggtctcactctgtcacctaggctggagtgtagtggtgtgatcatggttcactgcagcctcaacctcctgggctcaaatgatcctcttacttcagcctcctgagtagctgggactacagatgcacaacaccacacttggctaatttttgtatttttttgtagagacagggttttgccatgtttcccaggctggtctcgaacggggctcaagcgatcctcctgtcttggcttcccaaagtgctgggattacaggcgtgaaccaccatgcccagccaaaagaacttttttctactctacttgacgtagttgggctggatacggaattctctcagaatgttgcaggatttgctctgctgtcttccagtctgagtacctgtcttaactggcacatataattgtttactttcattgtgatccatgtggatttatttctactacctttagggctttctggctaccatattttttctttgctctctttcttttagacaaatgacctagttttaaaattccatatttttaccctctgtgagtttgaaagctttaaacactatttctattcttttggtggttacccttaaaattggaacatgtctacttgactcagaaagtttgaagtcaatcaatatccctcctacacttcccaaacagttcaaagaacttaagagtgtgttcattcaaatcaccccctcactgatttccattttttgttgggactttggtttttaatcctctccaaattagtgacgatcactttcagaagcgaatgcttattcagatttacctgcacttcccaacgcctctggataccattactgtccgcatttctcctttctccttacttccttcttcccgaagtacagcgaaggtctcttagtaaatacaacttttttttttttctgtgaaaatgtccttatttgttcccattattgaacgataatttaagctggttgctgaaaactaagccaacaactgattttccttagcacactgaagattttacttccttatggcctctactgttgctacttggcatttcctgagtttcactgttgaacctggggagtaatctgcctttcttctcaagctgcctttaggatgctatttttcccactgggccctcataccaccatccatgtttgtaatgtctcttcctcacaagcatctcttttatctctgcagaattctaactaacttctgcagatctgttttccagttcccatagttctctcttgagaatttatgctatttgctgtttaacatttccactggggttttaactcaatgttttcactctagaggctttatttgattctttaaaaaataatcccttttaagatgtattctgtcttattctttcctttgacatctatttcttcttttagcccttcaatcactttagacatttctattataatctcttctattatttgaattctcatgttgagaatcttgtgtttgttgtgatcgctgactcatgttctaatttctacatgcttggtaatttcctagaacaagctcatcatctgtgggcatcctaggattccaaaaggcctgtactgtgcaagggtcactctagaaaagttctgcctttgttctgcaagcaagaagcttcaggggtatcgccagtctgctggctggtctggtgccagctcgggcattcctgcaacatgtagatgttataaacacagacttagaacttggatgttttccactgttcacagaagacttcctccaacacaatccagagtgtggggcaatgatcagctcccttgacatttctctgatcccatgggggaaattttcttgcatcccttttacctgggaatggctcttttgaggggatttctgtttcaactccatgcttcacgtgttcatgcaaatccaaacctctattattgttagggtcgatttcagggtccaatgaacccaccttgcccctccccagagctgcctactctgctctggctttatattcctgctttgctttcggttctctgtttttctttcttattctgttgttatagcttatatagcattttaagtgattgtaatgggagcggttctaactttagctcaagctaccatgtcactgaaacaggaaatccaccccattgtcttctggcttccaatgaggttgaaaaatccaatccatcttcattcccagtcttttgtatgtgacccgtttttgctcttcggaagctttatgcccagtgctctggaatcacacaatgtgccacaggacattttccatttaccatttttgaaacttatgactgtccattctgaaataattcttgtttctctgatacattatggtccttaattttccctttctctctttatagacttcctagatgtcagacgtttttaatctgtttcctgggagccttcgtcaacttcaaagaaaaagtaatggttttaatttccgagaactctttcttgttctgatttttatagtaactttttatttcatggataaaatattggctcttctttctgagtatatttgccatgtgctttaaggctttctcctacctgaatcagctctgattcctcggagatacatttttctctttgctttctctggcctctaccttccatactggaagctttctgaacatatccagttattcttggcatccattcctatttaaaagtgaggcaataagagatctttgtggtgatggaagagttgtgtatcttgactgctgttacatgtggttacatgaatccacagatgtgataaagggtgtgaaactgtatgcacatattgtgtacccatgtcaattccctgattttcatattgtctgtgattatataagacatgaccatcaagggaaactgcatgaagggtagaggggacccctctactatttttttttttttttttgagatggagtcttgctctgtcgcccaggctggagtgcagtggcatgatcttggttcactgcaacctctgcctcctgggttcaagcaattctcctgcctcagcctcccgagtagctgggattacgggcgcatgccaccatgcccggctaatttttgtatttttagtagagacggg[136 bp omitted]catctataattatttcaaaataaaaagttgggctggggatggtggctcatgcctgtgatcccagcactttgtgaggctgaggtgggcagatcacttgagctcaggagtttgaaacctgcctaggcaacatggcaaaaccccatcttgacaaaaaacacacaaattagccaggagtggtggcgcatggctgtaatcccagctacttgggaggctgaggtgggagaagtgcttcagcctgggaggcagagg[136 bp omitted]gcaaggctctggacaggtgaggaccacattagatggagtagaaagctggccactgctgtgaggagccactacatactggcaatggcaggtcttgttgctgacatgctcattttttccagactggaatccaatgccatgcctcatgcctggcctcagcactccaggagcaggcaggggcatggctgggatttgctcttttagtgtgcagacgttcatgaatccctctttcagtccagcgttaccctgccccttgctctgcccaaggtacctcaatctggtgcataagcctctgctctctcactcgccagcaaaggggattgagtattttctggtttgcagaattcaaagagatgacttgggaagtttcatccctccctatacagactgtcaactaatcataatccctctgcttttaggcccaaaccttattcccaccttgagtgccaccaattgcctccaattcctgatgctttctaaagtgcttttccttggtgtttttccgcaggtaccaacatttcagcctctgctctgctcagtcttctgtttgccttccaccttctagaaattggagatcttttgttattgttttctctcccattctgtgtccttgtgggtttatacatctaaaaacaattattttgctgttattttagcagagtttctaggggaagtagatttaaatgaatatgttcaatctaccatgtttacctaaagtatgctaaccgaagattttttttttcaatttgagagcaggtactatttattaactgaccagattagaaaaataatcacggtagacaccgcagttcattcttctaagaagcctgtggatctggccctccctgttggcagcagctccattttctacaaaatgggtggtctttttcttcattccactttgtggagaggataacttgaagggccacagtatagagctcatgaatcagatcctcgatgcagatgatgccatattgaccatgagactgatcaatcaaagtgttatctgtcaaagcaattcgcttcttattgattttgccacggccatgcttgtagatgagtttatttactgatttcagatttgggttccccttgtaatacatggtttcacaatcctcagcatgttaactgaaggtctgctgaacttcacaaaggttccattaaagatctgacaaaggcaaagaagctgcaacatcttttggccctttgggctcacaccactgatacctctgaccctgatgacaaatgccaattcgggttctgcaggcacaaaaaagttgccagcttttcttgccatcctagcctttcaaatttcagttctgtacatctgcctagattccttgtggtagtgcttcacttcttcgtgcataagtttcctccctgccttttgaagcatcttttgggcaaacttcttattcaggtgcttgatctttagttctgtgaaattcctttgctttttcccaagggtttctggcacaacaggaagctgctgcttctcttcgacaccctccatggttccagccaaaaaagaggcaaccggaggtttttaatctttgttttgcaaagtacttatatacaactagatctgaagatgaaggagaagtaataagtcaacaaaagccggccacggtggctcatgcctgtaatcccagcactttgggaggctgaggtgggtagatcacttgcagtcaggagctcaagagcagcctggccaacatggtgaaatcccgcctctactaaagatacaaaaaaaaattagctgggcgtgctggtgcacgcctgtaatcccagctacttgggaggctgaggcaggagaattgcttgaatccgggaggcacaggttgcagtgagccgagatcgcactccagcctgggcgacagggtgctctgtctcaaaaaaaaagtcaacaaaacccaggaaatcacaaattcaaaaattagccatccttagttcagacattcacctactcaccaattcattttgatggactctcctcatgttgctattctgagatgtgaaatagtgggtagggaaaagaaagactattagggccagacactgtggctcacacctgtaatcccaggagctgggaagcccagcgggggggactgcttgaaaccaggagtttgggaccagcctgggccaagactccatctctatgaaaaagtaaaattaagaataaaaaattttaaaaagaacagctccattagaaactcccccagacacctgaaagggccacacatccgctcctacaaatggctttttgtttcaaatgttaaagaaagtttaagtcccatggattgctgtgatctaaccatgacagtcagaactgatccaggcttagggtggaagacactccctgtcagtgtcacgcagcaggcatggataaatccacactttacacactcacaaaattagattagattcttaaaaggctaaactaaaaacaatcactgagaaagtcaccaaacataaatagcagcacatgtgcccctcagcagacagccacacagcatggagaatctgtgaggcagcagcagccaagagcctttggaaactcaaggccccctatcgccaggcacacacacccgacactctcatgcacatttcggcacaaccatgtcttagacccgtcaaactgctacggaaaggactcagttatcaaagtatgttcctgtcaatccacaaatatttcatcatcccactgtgtaagaagtactataattgtactatgagagagactcaaaagaaatagattgtatggtctccgccttagaaagacttatacccagcatgccacggtacatgtgactggtaaatatttgaaagcttgcccactgtccaagaaaacctatttagcaacccctttctcatcctaggatgcttgtggagccccagatttaaaacaattacatctgtgttcctggaaagacttaggacttaaagccctttcagtttctaagggtcttaagcatactgaaataggaaagggggttaaatcccaacataatgcaaaatggctagcacagatcccaatgacactgacaggcacctgccacaagaggtagcccacctgcgagactccatgggagagagggaagatccaaatgcagggtgtaataagcagaccaacagaaaactcagttcaaaaataagcacaggacttatttgaataaacatttatctaaagaagatatacacatggccaataagcacatgaaaagatgctcagcatcactcatcactaggaatgcatgccaaatcacaatgcaatacccatgcatgcccactaggatggctataaacaaagtgacagtcacaagcattggtgagcatgtggagaaactggaacccaccaacattgctggtgggtatgtaaaatggtgcagttgcttcagaaagcagtttggcagttgctcaaaatgctaaacatagatttacctaccatacgacccaacaactcctctcctgggtataatatccaagagaattgaaaatatacattcacacaaaaacgtggacttgaatgcttatagcagcattattcagaatagccaaaaggtgaaaatgacacaacaacaaatgtccatcaactaatgaatggatacacaaaatgtgatctatccatatgatagaatattattcaacaataaaaacaaatgaagtactgatacatgctacaacatggatgaaccttgaaaacatcacgttaaataaatcagtcacgaaggccacatctagtatgcttccatttatatgaaatgtccaaaataggcaaacccacagagacagaacatggcttccaggagttgggaggggtgcagggaaatatggtatgactcctaatgggtatgaggtttctttttagggtgatgaaaatgttctaaaattagatagcggtgatgaccgtacaaccgtttgagtatactaaaaaccacttgaactgcacactttaaaagggtgaattttatggtatgtgaattgtctcaataaacctttttttttttaagagatggggtctcgatcgcttgaacccaggaggtggagtgagtattgcgccactgcattccagcctgggtgacagagcgagactccatctcagaaaaaaaaaaaagagagagagagatggggtttcggccagtgcggtggcctgtaatgccagcactttgggaggccaaggtaggaggatcgcttgaggaaaggagtttgagaccagcctgggcaacatagtgagatggtgactctacaaaaaacttaaaaagaaatgaaaattagccaggcgtggcggtgcgcgcctacaggcccagctacagtgtttcctgtaaatcctgtgctatcaattctatttttcaagtcaaataccagaacttgtctcaaactatactcaccagaagacaaaaacgagccctcctaacatcttctactcttagaaattagatgagtgtcctcctatagacttttatttcctaagaaagaagtctgttttctttgtctgtggcttccatccatcttacttaaccacgtaagcctctctgggcctgactataaaataaggggctccagcgaaatgaccccgaggatcccttccagtcttaccactatagacctagacatacatggaaacccagcacacagtcctatctcagaggttcagatgaagaccccacctgcaataagcacacggtggctgaaaactccttcttattctgatgttcccagcacagaaaaggaaagtgagaggggcaagggtctatgggagaaacggagaggaaggaaaccccaacgcgtaggaaacacagtcctaccctggaaatcacagggcacatttgtcttcctggaaactgtaaaggacacgccaatagtcctgccatgaactgtgttacctgagatatgtctcacaggaatcacatgaagaaaaaaggattccaagcatgaattagggtgactcctcgtcctggggaaaggcaacagaacccaccttatatggccgtggtttgcttttgggttgtggagagtccttttaagagtcttgccttggcttctgcaaggagctcagagtggtcccacactgctaacacaaactaagcaattccgacatggcaaaggtcaggagtgaagtcgaaaggcacctgcgatgttctggaaatgctttttcacttaagcttttttttttttttttttttaaaaaaacaaacaaaaaaacaactttgtctctgccctcacaaaggtcttctgggtcaaatacctctgttatagtccttccacctccatcggtggtacctctggctactgagaaaaccctgccccaatagaggggctcgggcgcgcccatccagggatcatggattcctacactatccccaaaatggcagagctgggctctccctgcagtggcacactaggctggatttagcccaacagcctggcacaaaggacaacaatgaggagaggaaaggggaggtgacgcacctggcaaggcactaagggatgagatgcaccaagccagctgtgagtcaccacgaagcaaacgggaaggtcaggatccagatccaggtttgtctgaatccaaagctctgacctgccaaatacagagcagttgtacagaaagctactatttatgtaaaaagctaaaatataaaaaaggtatactcacacacatagagtttggtcacagtggctatccctggagagtgaaaatggtaggagggagacaaacatttcactacatatttgtttaaaccttttgaatgttgtgatatttgcatatattatctgtttaaatatacagatacacacacacacacatacacacacacacacacacacacacacacacacacacacaaagattaagatttagttttcaggttggccttacgaggcagacaagctaattcgcaatattccccccgtttactgcatgggcttggaaacacagggaaacagacgcagagctaaattatcccccagcagcagtgaccactggtcaggtgctgtgctgagccctctcgaaggtgatctcgtgcaatccccagtaactacaagattctgtcttttctagtcatggacactaagcaatcacaggtctacatgccctctctaagccctgtgtctgaggccttctctggctcacctaacgcctctcagtccagccctatgctcgggagccacattccctgagctgaaggcacgacagaccagcctgtcccgcaaagctcagtgacaccccggcacagaggggacagaaaacagttagcaaaaggcccagtcagctggccagagttctagccctctagatgctgctgactagctggggatcctgcagatgtcacatcaaattctcatcatcgttaggccccgtgcggtggctcacgcctgtaatcctagcactttgggaggctgagacgggcggatcacctgagctcaggagtatgagactagcctgggcaacatggcgaaagcctgtctctactaaaatacaaaacattagccaggcatggtggtgtgcacctgtaatcccagctactcaggaggctgaggcaggagaattgcttgaacccgggaggcggaggttacagtgagccgagatagcaccattgcactccagcctgggcaacaagagcaaactccatctcaaaaattaattaatttattaattaattaacaaataaaagactagaacagccatccactgaaataataaagagaagttatccccgagtggtagaattatgggtgactttttttttacccacctttcctatgtccttgcacttttgtattaagtatataaataacttaatagaccaatcaggaataaagctataaatctaaggcaaataagaggatgactccagcaatttttcttcggtgctggattgtcagagactgaagaacagactattacacctgggactttccctccttgctggaccctgaatccccgagagcctagacgatgcctccaggcccctgccctgcacgctgtccctcgcctgctgctgctctggtgtccagccaccacctctctactcaaaagtgctatccaaggttcctcacaactcccaaactgcctctctttacaaagcatcctacttgaccccttgccctgacatcaaaagccactggctagcaccctccttctgaacaaaattcaaaaaaggtaacgcctcttaggacagagtataaaatggggattagtgaaagatcaacgaggagcatttatttcaacatttaaaaggcaattatgctaggctgggtgcagtggctcatgcctttgagaggtcaaggtgggcagatcacttgaggtcagcagttccagaccagcctggccaacatgttgaaaccatttctactaaaaatgcaaaacaaacaacaacaacaaaacaattagctggcatggtggtgggcacccataatcctagctgctcaggaggctgaggcaggagaatcgcctgaacctaggaggtagaggttgcagtgagctgagatcccaccactgtactccagcctgggcaacaaagtgagactccatctttaaaaaaaaaaaaaaaaggtggcaggg[138 bp omitted]gtggcgggcacctgtagtcccagctactcaggagcctgaggca[134 bp omitted]ttaaatgcaatgtagtatcctggattggatcctggaaaagaaaactaatccaaataaaagtgtatggtttagataacagtatgtggctgatgttaatatcttttttgcgagatgcagtctcaccacaatgcccaggctggccttgaactcctggacccaagcgatcctccctctggcctcaacctcctgagtagcttggattacaggcacgtgccactgtgcctggctcaatgtcaatttttttactttcgacaaatatatatcatgatatgtaagatgtgaacattagggaaaactgggtgaaggggatacgaggactttctgtatgatctttgaaactgttctataaatctaaaaaatgtttgtttagaaactgcaattatgaggttatgaaataggacagcaataagaattaaaggaagatgggggacaggctaaatacacgcttcgaagggaggtgtctctcgttgcctggatgcctccaggcatctaatttgcaatgtgttcaaaacggaatctccctccccactcctctgtccacactgctattaccggcaggaccagccacctggccatgctcatgagaagcttgagtctctgccacgcttccctcttcttactgccttttggtaggtgaccacatgtctacatccactgcttttagaaaaggtttttctaaaagctataaaacttaatggtttgaggagttattatttaattgagacagagtttcagtggggaatgatgaaaagttctgggggtggatggtggggatggttgcacaacaatgggaatgtacttaatggcactgaactgtttatttaaaaatggttaaaatggtaaattttgttatgcatattttactacaattaaaaaagaaaaacttaaaggctcctcgtcgctcttctgatcacctcaaagccctggcacactaatgtccctactcctgctctgtctcccacctcccccactacaccccggctcagctgtacgtgcaaggctgtgaaacacatgctttacctgttattcctcaaacgtccttcacacctttgcgccccatctgagaaaccttctccaaccacctcacctttctctctacctcactactctaataattgaaagctttattactgttctcttaggttcgatagatttcagattttactggggggttaggtactaagtcaaattgaacatcattaaaattatccttgaaaaatcccttaaatccatcagtaagaccaacataaccagtgtttcctcttgcactggaacagatcactgcttcttccactgaatacggaatgaagatgtttgttcacacttccgggtcattttgtgtgagaagtcagcacctctagcactccacgccatgcatgcataggtgacgccatgcacaccgagggcacagaggacacaactcatctgccccataaaatcctcctaactggcctccaggcttcctagctccccacattccaccttgtaaactgccgccaaatcacccattgtaaactctgatgtaagtcctctttatgtaaaaaacaaatcccaactcctgagtcagtcatccaaagacctgcacacacacagcaagcatgacaccagtggcctttccaggggcagctgacggcgtggtttggaggcgcttgcctggctttagcccaagcctttctgctcactgccttaacctctcctcctctgtgaagtaagaacacctacttcacggggttctccagtgactgtgcctagaacgcggcaggtgccaacaaacctttgttgttatcgttatttacagtcctgtgcagcctcgcctgccagcactctctcacctgacttcttccaccccacctctagctcagtggtcctcaaaatatggcccagggatccctgaaaccctttcaggaggtccaaagtcaaaaattttctataacaagaccaagacgttatttgccttttttcctctcatcctctccaaagtctgcagtggaattttccagaggctacatgatgtgtgatgacgtcactgctctgatggccaatagaatgtatgcccaggcattcttggtttttaagtttgttttcttaaatggtagatgttaatagaaacaacccatacaaataaaagctcacaaagctaaaaaattattgtggtcctcaataatttttaagttaaaggagttctgaggcctaagtctgaaaccactgaaatgaacttcctgcctctcttgcctttatgcgcactggacttcccgcccaggacgccctgccctccactgctgctattccaagctcttatctttcaagagtgaactcaaaaggcacctccatgacagcatctcctaatgctccccaccacatccttcagcatctcaactgtgtcctgcaggtggaactaggctctcgctcccttatgtgcatcagtcattcacccactaattccactcattcgcatgtgtgcaatctgccatttcccaagtgctcactaaacaaatctctcctagcacctactttgggccagtcactgaggatatagcagtgacagagatgcttctgtgcttctcttaccttccggctggggacagtaaacaggacatgaagtagtataatctcaggtaatgccaggtgctatgagggaaaaaagctgagtaggagatcacagcgatggttctctctcctatctaagtctctgaagcagtgctacccaatccagtagccactatggtaaaaagaacgcacagtctctcattagtacttatcatatgagttatatgttgatataatattttgaatacattgggttaagtaaaatatattaaaattaatttcatctctttgttttttttactttgagacagggtcttgctctgttgcctaggcttaagggcaatgggtcgcacgatcacggcccattgccacctcgaccgccaggactcaagcgatcctctcacctcagcctactgagtagttgggactacaggcgtaagctgccacgctaagatgatttctgtactttttgaagagatggggtttcatcatgttgcccaggctggtctcgaactcctggcctcaagtgatccgcctggcttggcctcccaaagtgttgggattatagccatgagccaccatgcctggcctctatttacttttttcagctgtggctcacattgtatctctatttttcaggatccttccagagcagaggtgggaaaactacagcctgcaggtcatgtccagcctactgcctgtttcttaaaattttattggaacatgaccatgcccattcatttgcttactgcctctgaatgcttttgtgctataatggcaaagctgagttgttgtgaaggagacagtatagcctgcaacactaggacatttatcatctggccctttacagaaagtttggctggccccttatctagagggcagggcctgtgtgggggtatctctctccccacagcacccagcacagtgcagggggcacccgtgtagtcagtgaagagaacctgcattcgggcagcacaaactggcctaagtttgaatttgggttggcctcccacttgctatgtggccttggtgagttataagctttctctgggtttcagtctttccttttctaaaatggggcactggccactttaagggaagtgagatgacacaggtaaagtgtgagttaacatgcctggctcacagcaggaatccattgacactggctggataaaagacagcaatttcattaaaatgctgaataatcattctcctcttggattgggtgtgttatactcaaaacaactaccatatttacatcctaaaatgaaatgaaatcaaatgaaacttcttagcaacagcagtgcattaataataaccaccagcaagcaatggggaggaagaaagaggcaagcctttctaacactaaagcactggcggatgatgagtccgcctcatccctttcctgcccctcctgcagcccacctttggacaattcccggttcattaacactggcactagaagaataagcagaggggagagaaaaagcctcgaaccaaagacgtactaaaactgaacccattgacatcaacgaggtttggaagggcccatataagtgcaattcaaaagacagtcccagccagcagcatcaatgtcactgggagtttgttagacacgcagattcttcagcccaatggaattaggacaatttgcattaggagaccctaggtgatggcatgtggcattcaccttggaaaagtgctggattagaatccatttattcatgctctcttcacttccccctccccctccactgataaacaggggtggttatatctactttcaatagatggttcctgactccttcaaagtaataggcctggcatagccactgcaactccaggccccgcccccaagggtcttggtgcaggcagagtgcatagcctaagctgcgttcctgattcatttgcagtcgggtggggcattctttttccaatagagagcctcgttcgtacttagccatcctcctaaggtgaggactgggtgctgataaccattcaggaaacccacgtgtgtggaatctgccatttgtcaagtgctttaggcggggttcttacaggggaaatgcagccagaagcagcttcatttcgaccacaggtgacaccagctctagctagctctagcctagtccacaatgcacgtagtctgcctggggagcccgcgacggaagttgccaaagtagtaactacaatatggtgtattctgattaatctgctcttcctagtattaggatgcccatacgtcccagtcctggagtaattattcatagtactctcaaaagaacccaacttgggcaataaattactgtacatggtcaacacacctagtacggggggtgggagacagagtggtctagtaaggggcccatacagctccagcacagaccacagggcatctggaagaagactaagaatactatttgtagtaagtgggagggagcaaactggtcattcatgaagatgtttcccaagagtctgcatgtgcgtgatagcacacaagctttaggatttgctgtctctgtttctcaaggagcttcccatccaggagagaatgtgggtgtgccatggggcatgagaggaagggaacggcacaattgagttggggaaaagcagtcagattggctggaatcaactgaagaggcaggagatagagcaggatgtgtaggtgaggggccctgaatgacaaccaaggcatgatcagaggctgggtcctgacacaatccaggcgatcacttgggaggtcagccctttggaggtcagttggcggcagcgctgttcactggttgaaggaggactagaggcagggagaccagggagaaggctacacagtgcaggcatgaggcaagcagagagcaaaccagggttgtgaaagggaaatgcaggcacaggatgcaagaggcctctcaaagaactgatgacaagttagaatgagggccaaagaaggtaaattaaaaatgaccccaaatgctctaattttgagaagattcaagcttaggtatttaggggtgaagtgctatcatgtctgccactaacttagcaggagttagtaccagacataattcaggaggaaatatatttacataagcatacagataaggcaaatatggcaggatgttaacaactgctgactcataatggttgggggttagcaattactggctttcaacattttggtatggtcaatattttttcctattaaaaagttgggtcttgggttcagaaccaaaaacaaaaaaagttggggaatatatatatatatttttttcctcgagaaagagtctcactctgtcgcccaggctggagtgccggggcacgatctcggctcactgcaacctctgcctcctgggttcaagcaattctcctgccctagcctcccgagtagctgggatcacaggcacccaccaccacgcatggctaatttttgcatttttagtagagatggggtttcaccatgttggccaggctggtctcgaactcctgacctcaagtgatccacccacctcggcctcccaaaatgctgggattacaggcgtgagccactgtgcccagtcagaacattttttttttttttaagtccacagacttggggatgggaagggcagtcacaatcacaagattttatacccacaaagtctacatggcacaatggagctatcaagtaagcagctgggcatgtgatgtcactgtggaagtcacctaaatacaggtaccagatgcagctacaagcagggaggtcactccaaaaaactggggaggaagagataaagaaaagagaggtctttggaaaagctgcacatctatgggtaagaggaagaagacaaaaggcaaaaaagagaaacatttggtatagtctggtataatagaaccccaaggaaggaaataccgttaagagggcatggtcggccaggcgcggtagctcatgcctgtaatcccagcactttgggaagctgaggcggatggatcacctgaggtcaagagttcgagaccagcctgaccaatatggtgaaaccccgtctctgctaaaaagacaaatattactcggacgtggtggcgggagcctgtaatcccagctacttgggaggctgaggcaggagaatcgctagaacccagaaggcagaggttgcagtgagccaaggttgcaccactgcactccagcctgggcgacagactgagactccatctcacaaacaaagcaaaacaaaacaaaacaaaacaaagagggtgtggtcagctaggcaccgtggctcacgtctgtaatcccaacactttgggaagctgaagtgggaggatcacttggggtcaggagttcgagaccagcctggccaataccatggtgagaccctgtttctacaaaaatattttaaaaagccgagtgtgtagttccagctgcacaggaggctgaggtgggagcactgcttgagcccaggaggcggaggctgcagtaaggtgtgatcacgccactgcattccagcctgggtgacagagcataaggctgatggatcaaaatgaggacaaggactgagaaaatgtcagcaaatgcagtgatcagaaattcactagtcatttgtgaccttcaggggagccgtcacactcagtggtgtgagaggttagacagaaaatgactgaaggcgagagcaggtcatgaggaaatggaggcagacatccatttcccccagtacagtgctgggatgacccaaaagcacactgggggaccagagaaatgctttcttccttggcttgaagatgatgtcatcaaccttcagggccctcagaatcccttaaataataaaacagtcagagcacatgaataccgggatgctttcagcactgcatatgtcaagccctgaggctcccagaatccctggagacgtatttgtgtgtctacacttcccacctgcactagcggtgaccacacacacagtccggtgaccacacacacagtccgctgaatctgccggtcaaggtatctatcttcaactgccctcttccagagggagctcccacaaaaaggaccagaattaaaaggaggaggaagaacatcatcggagctgctgagtgtgaaaagaccagctctcttgcaggatgcaaatgaaggcctctctttttaagggtgcctgcaggaaatctctctgtcagtgctagctgggaatattcatgtcattgttgggtaggactgactgcctttttttttttctttttccaagcatgactcagtgttttaatttttttttttactttcaattatcatagtcagactgtttcccaggtatagttatgctatcaatttaaaccaaaagtgacctgaaaaatgtcttactcctttgacttagctgcagaatattaaatattgctgtggcctctctaaaaatgcaaaccaactcaaaatcccccaaccaaagaaccagattaaacccaaaaaggacattcattccaatccttattgcccactgaatacttctgagtggtatgtcaactgactgcaatgtttaaaccataaaaatgtgcttttcacaatactgcttcaggagaacacagcctacctgtgtctaggggtgacctggacaaagctgacccaaggatccatccaatacagtcagcctggattgaaggacattaaatcctcaatcacagagtatagctaacgaatgaaacaaaggcaaataacttggagtagataaatccagagagttatccagtaacacaattcaattttattctcaactacagcaaattccaataagcattttgctcttccctggctataactgcacacatcaagtggctcctgacagagtccccccgtggctggctggaatgtcagaagatgaagcaattccgaacgggcactcttgctcagtaagagctgcaaatgtggatgggcagcatttagaccatgaccttctccaggactggcacccattcatgggcaagtggagcctcaggaaggagctacagttaaaaataccgagatcctattaagtgagaaaagtgatagcctcttgtaaactggaaagcacattatagacgttcctgattgtaacttgccccttttgattgtcattttaaatcagcaactccccatcgccatccagaagcaggctaagccttgggcaaggaaattccaaaagcttccatcagaataggagcacagatcatatcctcctgggtgaaaacccacatgtcacagaaaaccaccctgactccaactctgaggggaccgaccaccagcggcagctgacactgatcacgtgcccaggactgttgtgctggcaattcatgttatacacgacaattgcacccttttaaaaagtgctggcccccaacaggttccactggattccatgagcccccatggtgggttaagtagtaaaaaatagaaaaagttcctcttagtataacaggaaaatgaaaaaacaaaaacaaacaaaaaaaaaaaccaaacaaacaaaacagagagaaacagggataaaagtgaagtagagatggggaaggtgcaaagaggcctctaatgtcctaaagcaaaaacacacggaaactgaagggaacagaaactgaaattgaggtggaactcagcctctccaaggaatccttcctgaacctgtctcatgactcagcattcccagccgaaggatgacagcagcagagcggacaggaggtcaagttggagctcctaatggagctgaccacttctgaggcaacacagaaatgccagttacgtggagtgtctgcacacttgttttgctctaggaggtggagttggggaataaaactgaactgcagttcagtgttggaatgaatcagactacagaggttgcttcattcaacattgaggggcagtcaaaggttctctagaaatgcaatgtgtttttgacagttattttgagaatgactgaggggtcagggaatgaaaagagtggaatctgcagaagcacaccgccagtgcgaatgcagtgttcctcccgtcctgctccctacccatcatctccctccctcctgcctgcccactggcacaacttccacctatcccaacatcctgtgcctctctccttcctcacttgtagtacctcctattacactaagactttcaactgtttaaagaagggatgattaatgccaaccacaaggcttgtgattcatgttggatcagggcactcggtcacgtatagtaatgatctctgaatcctgaacttaagtattctcaggtgagaacaaagtacatttagttcaatttgtattcagattcctccacttagaagtgtgacactgggcaatttacttaacctctctgttcctcagcttccttctctggaatatggggctaataatagcaccacagggttgttgtgagcgtgaagtaaaacatctaaagcactaagagtgcctggcacacagtaacagtatcctggatcatgactgctcttattaccttaaaatataaagcaatactctatcatctttgtaatttataatctcattaccagtcttgagaatttcaagagacctttcagactctggaaacatacatacatacatacagattcattccatccccctcctggaggacggccggggttactttaaatgtgcattactgaatttctcacaaagtaacagaggtaggaagttcatgagtatttctagaagaggtttaataaagtcaaacctataatccatctggtcactagcaacacgagccattaggaattcctatgcccctgaaacaaccaccttccccacaacccgcctcgtgcaccttttgcttcccaaggtgcctctttggtgcagcatcaccctctttctcatggaagtgatcttctgaaggcacagggctggctctctctgacagacatcagaatgctgtctgctaataaccaagtggccatcctaggcttgacccagctacacttctggttattccatccgagcaggatcatatcggggttaggaagatagacctcttatttcattgcagagggagaaaatgaggcagtgacttggtcaaggtcattcagagtaggtgacagccaggaagagcacccaagggttttggcttccaatcacagtacaaaacacacacccttcatctggggaaagtacccttgagtcaggcagcagccagacagaagcaccatcagggcactgaggcccgagggctagaaggggaaaaatcaagggacaaagaataaaatcacagaacagctgttaagagtctacaagtgctgtgatcctatctgaataaaacgcaatttagattcacttagtcctgcatcttggttaaccttatataacttcttcacattacatcactaagaacaattgcttttaatgggcccagcacccagacaagtgagacaaacttcacgtgccatgatgctacacctaaatagctttccccatggaaatgctggccagcgtaggagccaaaaataaactgcaaagccaattcccgagggacctgtcatcagggatgtttcacacacacagcttcataaaagcagggtgatcacagacagccctaatttagaggcactatatctcaaacctggtgaaaccctgaatgtcatggcaacttaaaacaaaagacaatgcaaaagagatgaaaaagcacaagaaagctaaagcataaacgctttgcctccgaaacgaaggctgaacttgaactgacagacagcagtcctgctcccttacctcgcagggggctgttctgcccaaccatgacaggtggagaccagaaggacccaccacgtctagccagtgctcatgaaggtttaagtggctgctggcatttggctttgttacaaaattttattcaaaggatgactggtgatggggaaggggcaagcctcctctaaggagatccatggccagatggacagtttcaagtggctacctcgctgaacaggtcagaagactggagaaaggaagaagcatataagagacactggccactagctccttttgagtccttaagaggcttaattttggtggctggaagcctcaggaacacgacaaattccatagcttcatggaagaacttactttgtttctgttgctattttcatgaaggcagcagggaaaggacatgacttgctgcccagtctcttcatctctctttgtaaatttgttcactaaaaacttgagactaagattaagcctttactcattgccctccaatttacagagaaaactacaaaaatacgccacaccctatgaaacactccacattaaatagatactactaaaaaatttcaatggggcaaggcactgtggcttatgcctgtaattccagcacttggggaggccaaggccggtgaatcacttgaggccagaagttcaagaccagcctggccaaaatggcaaactgccgtctctactaaaaatacaaaaattagctgggtgtgatggcgcatgcccataatcccagctatgcgggaggctgaggcacaagaatcacttgaacccgggaagttgaggttgtaatgagctgagatcgtgccactgcactccagcctgggtgacagagagagactctgtttaaaaaagaaactcacacacaaaaattttcaata[136 bp omitted]accccgtctccactaaaaatacaaaaaattagccgggcgtgatggcgtatgcctgtaatcccagctactcgggaggctgaggtaggagaatcgcttgaacccgggaggcagaggttgcggtgagccgagctggcgccattgcactccagcctgggcaacaagagcaaaactccgtctcaaaaacataaataaataaaaaataagtttctcaaaaccatcactactgtagtcccagctacctgggaggctgaggcaggaggattgtgtgagaccaggaattcaaggacacctgagtaacagtgagaccccatcccaaaaataataaacaaaccagtaactcaaaaaaaaaaaaaaatctgccactacattattttgtcaataattgggttctcaaatctcataactagattagtcaatcttggtctaatggtctttcctttacggcatactatcaccttgatggaattcataaggagcaggaggtgagaagaaaaatcatcctaagccacagttctgcaaggtcccaggacccaccctaccaccctgcttggtggtcagtaacagaccaggagacattcagctaatcagtcacctgtatctatagctcatggtaacagagctacctatcaggtataaactccaccctccaaaacaaacctattctaaatcctaaaagaactatatcttgccacccataaatgggcatcccattccaccacttccttggaatttctgcgtcccttggcttttgctaaacccagatgctacaatgacaaaataccaccaccgagccacaaaacggatttcaacaaattcaaagcaagtcacaggaggccagctgcaaaatctatccaaagtggtgcctcaaagttgttgttttttttttcttttcttttgagacagagtttaactcttgctgcccaggttggagtgcaatggtgccatctcagctcaccgcaacctccgcctccctggttcaagcaattctcccgcctcagcctcccgagtagctcaggttacaggcatgcgccaccaagcccagctaattttgtatttttagtagagacagggtttctccatgttggtcaggctggtctcgaactcctgacctcaggtgatccgcccgcctcggcctcccaagtgctgggattacaggcatgagctaccacacccggccgttgttttcgatttaactccaaaataggtatttcaagtcaaactctgtataattacacatagtgcaggaggcaaacggagcataactgcaaacaaagttaaccaccaaagtcaagacggacgggaacaacaactgataaacatagcggctcccagtagtgagctgggcctacctccctgagtcctagggcaggaggccacaacacagaggatgctgcagtcaaatgagttgcgttccaaaaatcacgaatctctcaaatagatgggtggtgaaaaacattcttaaaaactcacagaaagacaccagcaatcatctggtgtcacacagtatacagcaataaccctcttttactgacacaatactgggtaatttttaacaagcattctgttgcacaaaagtaatattttccaaatactcttgtaaatggactgataattttccttccaagtctcagagctgttgcctgattcacatttctctgaggggaagcagggtcctgtgtgtggatttgtgtctgtggatgtatgtgcatccccaacaaaaagaccccgctggtatcagcagtcacttctgcctctaggaaatggatcatgtgctcttctctggagtggggcctttttccttctcaagccgttgtcacagaccccgctttgtagtttgacatgaaaccccgttcctctgtagtctttgtctcccactgtgtgagaaacccagatcaacttccaaagtgccctcccctgaaatcagacctctcaacctcccaaggacctaaaacagcgtaggcctgattcctgcttagaaatgttttcttgaaggggaggggaagtaggagagaaagaaggggtgtgagatacaggggggtgtgtgtgtgtgtgtgtgtgtgtcaattactgataggaattcacattctggaaaacaagccaccaaaccaacccgggttcaaggtttcgggtttatgatgacaagcctctttgttttgtaaaactgctatactcactagcatcaccccaaaaaccatacgggagtcagatgtctgcttaacagcttcaggtcaagaaaaaaccttcgggtttccaaattggtgactcccctctacccagggttctggattatttttttcaaggagtccatatgcacttaggagtcatcaatcccggtcgcagctgtcagaatcctcccccccaagtactattcataccggggctctgattgctaatgattttactcacaaagttccctgcagcaattaaaaggaggcagcagggtaaaacaaaaagaggctgggtggcttcaccataatgcagcctgtaagctagtgaacttcttgggttcggctgggattttcacctctatctttgttttggaatgcccacaacccctccctgcacggacccggcacggccttcatttctggatgcacaatgcagtaccgagctccttgggggtcagcaaaacgccgcactggtgtaacgccgaacgcgccccagaacctgagtccccacgggagtcggtccacgtctctaaatctcgaggccgacaccacagcataacatgtcttagaagtcccctcaagtcgggaagcccagggcccgcccggtcccgggccagcagtgcctggctggcgtgtgcgcccagagctgctgcaatgactttgcatggagtgtaccctccactggggctgtcctcccgcgtcggccactgcagtggcaccgctccgggcagggccctgcacgccgtccttccctggcctcggcccggccgccgaccccctgccgcccgcgccgcccagcccccgcccgccgcaccttggtctccttcacatgctgcttgacgccctccgggtaccactggacgcgcacgtagccgcggcgcagggggctggcccggccctcctcgtggcccgcgcccccggcctcggagcaccccgagctcccgcggccctcctcctcgccctccgagtccgagtcctcgccgtggatgaggcgcaccagcccgaagtgcacggagccacggtaacggcccgacaccaggtcgtgagaaaacagcaggcgctgcgagccggcttctgggccggagtccgaggacggcccggaggccgagtccgaggcgggcgccggcgccgggacgggggctgcggctggggccgggactgcctccggggctggagccggggcctgggctggagcgggagctgcgggcgtgggggctgcgggatccgccataactgctctgcgcgagtctcgggcggcggcggcgacagcggcggcgaacgaggcgcggggaggcgggaccagcgggcgccgggggcggggccatagcgcgctgacgtgtccctgcgtggcgccgtcgtcagggagccgggatgcagttgctaggagccaccgcctcgtcgctaggggacgctgaagatgccgcggggggcgggggcaggatggaatccactaagaaggggcgagaccagtgaggattcaactaaagggagcgagaaggggcggggacccgggaggaggaagtggagtggccaccgaggaagaggggagtggtcggggtggggcacaggatggtggagagactgtcaacaacttttaatgagctcccttggcgtcctagcctagcccccaggcactgggagcattgcagaaagagaaagatactgtccctgtcctctaggtgtttccagtctagttggggagacaaaacaaatacacattaaatagataacaaacaactccaacttgtaaggctataatagatacgtgtagagcatatgtataatgcactgtattcaggaattccaagcagttcgaacgtcatgacccctcagaagttgacccagaagctggtgaaggaggcccagagaaaggtaacaaaaggatcagtggtcccagtggtttggctacaaatccatgcagataaattcaaagctccctgaagccaagaatgaatggcaagaggtagtatagtaaggtagctaagagtggggaccacggattccaatttttggcactgccacttactaatctataaaaataggcacactgattaacttattttcatcttaatttgctcatctgtgaaatagggatgataatagcaatactcatctcattgggcaattggaggattaagtgaagtagaacagtgcctggcatttagctccttcgataagcttaaccattgttgtactatttccaaactccctgcctagactaaattccagactggcagaactgttatggtctgctccatattgtcattttaaaatataaaaagtaggccgggcgcggcagctcacacctgtcatcccagtactttgggaggctgaggtgggcggatcacgaggtcaagagattgagaccatcctggccaacatggcgaaaccccatctctactaaaaatacggaaaaaaaaaaaaaatagctgggcgtggtggcacatggctgtagtcccag[134 bp omitted]taaataaaatataaaaagtaactctagggccaggcgtggtggctcatgcctgtaatcccagcactttgggaggcagaagcagatggatcacctgatcacctgaggtcaggagttcaagaccgccctggccaacatggcgaaatcccttctctactaaaagtacaaaaattagctgggcgtggtggtgtgcacctgtagtcccagctacttgggaggctgaggcaggagaattgcttgaatctgggaggcagaagttgcagtgagccgagatcatgccactacactccagccttggcaacagagcaggactctgtctcaaaaaacaaaaaacaaaaaaaaggctggatgtggtggctcttgcctgtaatcccagcactttgggagaccgaggcgggtgggagacccgaggtcaggagttcaagaccagcctggccaagatggtgaaaccctgtctctactaaaaatacaaaaattagccgggcgcggtggcagccgcctgtaatcccagctactcggaaggctgaggcaggagaatcacttgaacctggggagtggaggttgtagtgagcctagatcgcgccgctgcactccagcctgggcgacagagtgagattccgtctcaaaaaaaagtaactctaggccgggcacagtggctcacgcctgaaatcccaacactttgactgcgcctgaaatcccaacactttgggatgccaaggtgggtggatcagttgaggtcaggagttcaaaactagcctggccaacatggcaaaaccccatgtctactaaaaatccaaaattagctgggcaaggtggcaggcgcctgtaattccagctacttgggaggctgagacacgagaaccacttgaacctgggggttggaggttgcagtgagcctagatcacaccactgcactccagcttgggtgacagagtgagactctatctcaaaagaaaaaaactaactctaatttaatgtgtcacctaagtttcaaagggtttagatacattctcagaggacagatttaaatggattgttaaggaaaacaagatctggccctaacctttctcagtcaacatcattttttccacatttttctacacgatcatcaacgaaagactagtaagttggatattacagtatttaggttcttcaaagaaggcagaatcccagctctttgtgttgtttacaggatcctgaagatacagaactatgttcatagaaaagttggttgggtgtggtggctcacatctgtaatcccagcactttgggaggccaaggcagatggatcatttgaagtcaggagttcaagagcaccctggccaacatggtgaaaccccgtctctgctaaaaacacaaaattagccaggtgtagtggcgcatgcttgtagtcccagctactcgggaggctgatgcagg[225 bp omitted]catggagaaaccccatctctactaaaaatacaaaattagccaggcatggtagcccatgcctgtaatcccagctactcaggaggctgaggcaggagaatcacttgaacccgggaggtggaggttgtggtgagccaagatcgagccattgaactccagcatgggcaacaagagcaaaactccatctcaggaaaaaaaaaaaaaaaaagaacatgcacaaaacagatggcagcctaagtacttaagatgtcttaggccaagtactaatagagtattgatgtaatattgggatcagggtggttgtcaatggacccaaatcttagaaaatttatctactaagatatagaacaaatgggctgaatcagctgaagggggagttaggatatgattttggggcaaggctgggttctcaaaccatggccttcccatcccagaacacaatgccaaatgaccatctggaatcactgctgtaaggacgcaggtccctactccctctcctgtagagacctgggagattaaacagcagtaacatagtagcttctgttctgcctcccatgaccctttcagccctgttttcttgccccctgataacatagcatttattaagcacatattattgaccaggcattgtaccaggtacttccaagcacattatcttgtctgttatcacaatcttggatatagagagtttttaacctcattttaccaatgaagaaatagggcccaaggaatttggcgcctaaggtaacaggtagtaacctgaggagtttccccactctaagggcaggggcttttgtagttatgctatttctttaggcttccctcagaagaactcctgattgcacaggggagtccatgtgtctatgtgtcccacggcgggataaggcagtgcagacctcaaatctgctttttgtttcatggcagggtctcactctgtcgcccatgctggagtgcagtagcgtgatcttgactcactgcaacctccgtctcccaggttccagcgattctcctgcctcagcctcctgagtagctgggattacaggcgcccaccaccacggctggctaatttttgtatttttagtagagacggggtttaccatgttggccaggctggtctcgaactcctgacctcaaatgatccacccgccttgccctcccaaagtgttgggattacaggcataagccaccgcacccggcctcaaatctgcttttgttgtcaaaaaatcaagtgagttttgcattgtactccagagtatgcctatgtttgttgttttaatgtaaaaactaatgccctttcctccctaatcattgagtaatatcggcactcctggaagacgtgttgtgtttattctgcggcttcttgtaataatggctaataatagctatcacttattgagctgtaacttcatgccagatactctactaagtgctttacatagattatcaggatactgccaggttggaggtaagactccttgattttacatgctgatctctccctcactagactaaacccttaagcatgtggaccatgttgtatttgtgtgtgtaaccctggtgcctaggacagtacctggcatagggatggagctcaataatgtgtcgtattaggctaggcccatacagtggctcacgcctgtaatcccagcattttgggaggccaaggtgggtggatcacctgaggtcaggagcttgagacctggccaacatggcaaaaccatatctctactaaatatacaaaaattagccaggcttggtggcgggcgcctgaaatcccagctactcaggaggctgaggctggagaatcacttgaacccgggaggcggaggctgcagtgagctgagattgtgccactgcacttcagcctgggagatagagcaagactccgtcttgaaaaagaaaaaaagaaaattatcatgttagcggatatcaaaggcctgagaacctgtacctccattctgtcagtttcctatcctttttccaacaaccaaaagttgaagaagctgggacagagctgccctctttggctgctccaaatcctttcaagtgcccccagtttcaactgcatctgagctgctttagagaatgagactcagtaaattcctacccatccgatggtgtcttttatggacctcactcagacccaagatgctctggataaggtttgaggcttgactccttcccagaccctgagcccccagccacggtctccatacactcaggctggctagcagggtaagtgtggatggaagccgctgcttagtttttatttttgtcattgttgaggtgtaggaaggaggaaaaaaacttgattccctaatgaagaaaccctctcttatcatggccccatctcccagcctttcgtggggaatagagctatttcttgggaggatttcacttatttataaatgtgcttccagaaactgagctggtctggcctctccccttgctaagtggggtgggtggtgtgcaggaggcggcagagccagcagcagagtgaactggtctcagggaagcaggccctgtctcgtccctatcttaaccagccactggagcacctctctggacccacaaagtatgctcaggcccaacactgccctctgcgggagcctgcttggcctctccattgctgtgcaagcgatttcagcctggcccaaagagctccttccaccctggagcaggtgtttgggaaggctagggtgccttaggcactggggacttcagctggggggtggggtgggaggtgagctgccttgggaaaccccccacaccctcatgtggctggctgaagaaatgcctccgaggctccagctgaatgccgctcaaggcttttggagttaaaacggcccttctcattcctggagcctcacctgctccttgcacaggtgccctgggaaaactgtgggacttgcccaaggtcactctgcagtacagtcaggatcaggacccagcccagctggcccttggccattctgactcctgctgtgagggtgggttgcaatccactgggcaaaacactttatgctggggcaacagtgaaaagtttgagcaatagtgacagcataggatcaccaggttcgtcctgtttccctccttcctgaagatacagggtgaggcacagtgaatctgctggaccagcttcaagaacaatatgtcagcctatccactgccacctcccacagctccagactcgtgggtgcttcctggatgtgaccagccataggtacaaagtagactcatcatcttttcctcaaatagtttcttctcccagagttctcatcctgatggatggcagtatcacttacctgggtactgagctggccacctgagggtcagccctcactcttaagctctacatgcaatcaaagcctgggtcttggcccctcactgccttttcacacccttcctgtccagagctgccccaccaggggggcagatccatggagatgtggggaggtgggaggtacagtggctgagagtgagcttccggagtcacagggacctgggtttgaagcttgtgctgctgctggtcactatgtgaccttgggcaagttattttactctctaagcctcagtttcctttctgtaaggtgggaataataataatacctacttcataggactgtggagactgtaactgaccaactgaatataacgtgctttgcccagtgagtgcatgatggcaggcctgataacattagcttttcttaggaattcatttccatctcttgcctagacctcggctgtaggcccctcaccaggccccaggccgtctaatctgtctgctgccttgttcccagggtgactgaaaatgcaagcacggtcattggactcttggctttatatctttctgtggctccccagggtccacccaagaaggtgcatgtggcctttcataaactgatctgatccttccaaccccccttccccctctgcatccagcatgga[138 bp omitted]cctccgcatcccgggttcaagacattcttgtgcctcagccttctgagtagctgggattacaaatgccccaccaccacacctgggtaatttttttgtatttttagtagagatggggtttt[133 bp omitted]tagagagaaggtctcactatattggccggactggtcttgaactccttgggctcaagcgatcctcctgccttggcctcccaaagtgccaggattataggcatgagccaccgtgcccagcctcttttggctttttaaaatgtggctactagaacatttaaaatcacatgtggggctcacacaatcttactattgggcagtttggctccattacttggggagccgtaggtcccttctttgtccaggaggtggcaatccctccctgccttggatgcttccattccagaatggtctggaaggttcctgaggtaagtgcctatctaatacggcgatattgagccccaaataaggcagggtcccactcagccctgcctttgagtcacccacctcaacggaagactctgggccgggcgtggtggctcatgcctataatcccagcaatttgggaggctg[269 bp omitted]actgtgcctctagctgataggcacctgctctgtgggtggcacgatgccacattctcaacccagcctctgttttccaggagtgcataagcctcttggggggacaggtgtgtagtggatgctgtggtgcacctccccatcacatccctctccaaacactgcccttggctaaaagaagatgcctcccccaaccactgactgtctgtaaggggcacaaagcctggccaacatggtgaaaccccgtctctattaaaaatgcaaaatttgctgggtatggtggtgggcacctgtaatcccagctacttgggaggctgaggcaggagaattacttgaacctgggaagtggaggttggtgaactgagattgtgccactgcactccagcctgggtgacagagtgagcctccaccaaaaaaaaaaaaaaaaaaaaaaaaaggaaggaaggaaggaagaaatcaatcaatcaatcaatcagtcagtggtgggtgcaacatctcaggtgtctgagaggtacagggatggagtaagtgtaaggactggggggctggatggctgttggggcagtcagtgcagaggagaaaggcagtcagaggctgggggtgaagaatcactgcttgaaggcaaagtggaaaagccagagggcctccttggcagcatgtaaagaaactcgcctcctgaagttaaggaacagagagaagtcagcatggcagagcctgagagcaggttgaattcccaaccttaatgagtcagcgatacagaggaggcccctggggagaagcgggagccatccagggacagaggttagtgcccctccttccttggggacaatgcctcttccttaggagacatgtactacccccttcccaaccctgagtatatactgcacctcctcttcttgcactgggccagtaactagggctaaatcgcaacctcacctactggtgaagtgctgggtcggctaagggaggaaggaggctctgtcctgaaggagctgcaggtcccagccagagccaggagagtggggactggaatcagaggatgctggctgggccaaggggatcagagcataaagttggataaggaacgtgtgttggtatgggagctcttttccctgttacagaatttatcaccctggcaaggaccctggtacttggaagcttggagaaagtgattcagggctcttacccgcagtgggcaggactgctgacggctcccagctggattttcctgcaactgccctcaatgaagcaagctgttccacccaaggttgatgcaggacaaagaggtgggtccagaagggcttcccaagtctgaagctcctcgggggatgcgccaaggcctcggttacagctgcaccatcacggctcagcttccactgtccagccctctgccctgctccatggtaggggtcgctcatgagacctctccccaataaacttgccgcacacagttctccatctctcatcccccggggagcctgccacgtggtagtactcaggctggaaaggtaaagacgataacgcgagatgtgctcagtgccaggtctgtggggcagacctttagtgcaggggaggagttgagagagaaagtgaccatcgaaaccaccaaaaaaatgcagccattgcacaagagcctgaagagagggctatgcttcctgcacgccgggcctctcaactgctctgcatggaaaaccggtatctcagaggcatcgtcaaggtgtccctgggacatggccatggggcccactccttggtctgccccaaatgggctcccttcagtctgggtgtgaaactgggcagctgacacacggaggggagggggtgtgtctccatgcgggaagctcccagattccaggtccagggcttctgcactgggcccggtggggatgctcactgcccctgcaccaggctctccgggggtatcagcagctgcagcaggctcggtgcccgggatggggtgggggccgtggggaggttttctccaacccccggccgtggcagcgagtcagtgtgcctttaatcaacggcctctgcactccacctctcactgtcaccattaaggccattcctctgcatctggcctctccacccatttctcccttctggaaggattccttttttttttttttttgagatacagtcttgctctgtggcccaagttggagtgcagtggtgcaatcttggctcactgcaacctctgcctcctgggttccagcaattctcctgcctc[134 bp omitted]cagcctcctaaagtgctgggattacaggtgtgagccaccgtgcccggccttttctggaaggattcttaaaggtcatcggagcctccctgttggcagaatctgagatctgttctccattctttgtggcatttcaggctctatctgccccatttcttggacattctcccctgggttcttcccttcttgtggcttcacctgtgttcctgttaataactcctttccctgctaacagtggacatcccaaaagcttggttctcagctttcgtgtggtgatacacatcctctcagaaccttttttactgtcatgatatcagttatccgctcaataactgtcgtcatcatcctcaccacatctgattaggagtgggatgggggctctgatgggtcagaggtgaggctctaccagggcaggtggggagttaggtagcatggtccctggcagttctctgtgtgccctggacaacccctctccaaactgctatagaatattctggagtcctgcctgggtgcggtggctcacgcctgtaatcccaacactttaggaggctgaggcaggtggatcacctgagttcaggagtttgagaccagcctgaccaatatggcgaaagcccatctctaggaaaaataaaaaaaattagccaggcatggtggtgtgcgcccgtaatcccagctacttgggaggctaaggcaggagaattgcttgaacctgggaggcggaggttgcagtgagccgagattgtgccattgcactccagcctgggccacagagcaagactctgtcttaaaaaaaaaaaaaaaaagaatattctggagtcttgaagtggaagcccagtcacagaccatgattttcatgggaccgaagagccttttgggagaaaactgaaccccatctggcatttgaaatgtgtaaatctgtctgggagatcgaaagaggccaggctgggtggagagacagggggacccctgaggggagccatcatgggtgaggcagggtggcatggtacacactgggcagggagtcgcggtgggtgagttgtggat[133 bp omitted]gtatcatctgttacagcacccctgggaaacatacagatgccagcttctccctgtctgtatctatatattttttttttttgagatagcagtttcactctttttgcccaggctggagtacaatggcacgatcttggctcactgcaacctctgcttcctgggttcaagcaattctcctgcctcagcctcccaagtggctgggattacaagcgcccaccaccacacctggctgattttttgtatttttagtagagacggagtttcaccatattggccaggctggtctcgaactcttgacctcaggtgatccacccgcctcagcctcccaaagtgctgggattacaggcatgagccaccgtgcccggccttgcccatcaggttaggtgtttatcagctgtctagagtgactgaacaggtacgacttggggggcaaaggacacattctcccccccatccccaagatccacctgagaggcagtcaccagaggcgttgccagcactcttaactgcaatagcaggacaagactgggcatctgataaacagtgcaatcggtgtccctggcgtgaggatgatctcggaggtgcttcttttttagagcccacctgaggtcaggatttttttttttttttttgagacaacatcttgctcagttacccaggctggagtgcagtggctcatcactgcagcctgaaccacctaggctcaagtgatcttcccacctcagcctcccaagtagctggggctacaggtgtgtgccaccatgcttggctgatttttaaattttttgtagagacaggggtcttgctatgttgcccaggctggtctcaaactcctgggctcaagtgatcctcctgccttggcctcccaaagtgctgggattacaggtgtgagccactatgcccagccccagggatctccttctctctgtacccatcaccctgttgggcccctcaccctccttattttccttctcattggtggtggtatgtggttttcttcctgttgaccaggacaaaggtcccagcgatcaccctgccctcccctgtctcctctcctgtcccacaagggtttgaacttcccagtttcaccatgtttaacatacc[136 bp omitted]ctcccaaagtgctgggattacagcggtgagccactgtgcctggcttactgcctcatcttgttccctgaggttctagacctctagggtgttgtccggaaagaacagggccatgtggaagtcagcaaagagagaggccgattgaacagcaggctcttctcaggcatcgccaagtgactgattaggattggccaccagggggtgccatggagccacagtctatgaagggacagaagaggccttttgggggaccctggaggttgaaggtggggatgcccagctgaggtcttggacatgaccaccccaccaaccaagcccaaggaggtctctggtcggtcctgagaggtctgttgagggtcccttctagcaggcaggtgggcctcagagtgcagaggggccctgggagaaggggacccagagacaggaggaatgcatgtggtgggtgggcgggggcatcgggacggggtcactccacggtcaggggctgtgtcccaaaccgtatgggtaggaacaggagcttcctctgcgggggggtcgaaagagtgcacctgtgaggacactgaaaaccagcaggagaatcatgaagacaggaaacaggagtctcattgtgagatgagtgggtcccaccagtgcagccgtggcagtgcatgtcaggaggctgacccggctttgcccctcccccttcacttgttggatggctctgagcaggttactgaacctgtctgtgcctcggtttccttctctataacgtggttaatactcatttggccgggcttccgtgtggattaaaggagacgcgtatccagggcccggcacatagcaagtgctgtaagcagtggcactcacaggctgccaggacaggaaggaccctcagaggtccgtcccaagctgtgtgggtaggagcagaagcttcctctgcagggggtcaaaagagtgcacctgtgaaatccaacctccaggacccccaggagcccgagatggacacaggatctgcactgctgggtggggcggagaggcaggtgctggcgagagaagagctaaggggtgcaggatggggtgtgagctggagggcagggggtagtcagagccaacagggagaggggcctgcatcccgagggaatgccagcaccaagtgccaaggcctgggcagccctgggaatgggtggagccaaggtcaatagcagagagctttgtagttgagatgtttggtagggcaacctcctgaatatttaaatatttaattaaattaaatatttaaataaacttgaagtagaacgtacttaaagtgcacaaattggtagcttgaattcccaccccctccccccacataagaggtgggcttgtccaagactccgagggacagagggagaatcgctggtgcccagccagtcggtgacagagcagggattagagatggacccctgaggcttagccccacgctctcttccccaaaccctggggcctcagtcagcctctggtaatcccttctgtgcccagggcaccagagctgacgtttcccttcagcaaggcaggggccgaggctgccagagccctgctggcgtcatcctgcctgggatagctcgagaggtggggtggggggattacaaacctctaacagcaccacaggctgcccggggaacatctgctactacagccttgcagcccggagtcccggattttactggttcccgtgcctgcggacaggcccccagggctagcggctttgtggagggaacactgggtatcctctccacagtccaggtaggtgggacccccactcctggctctcagcctttaggaacaggagcttctctacttggagcttctagacatggagggaaacatggaagccatggagtttattaagtgtcttggaaggtggagggagggatggcctcctctaagaactgcaaatctgcagggtgtcttgggagacaagagtgcccagaggggaatgtctgatgagctggatgtgtggggcagggggtgtcctatgcactctccttgcctgctcctccccattccccaggccctctgcagcccccggctccctctaacctccccaccccccaccacaaatcctgcatgtgtgtggcccagtctgaggccatctggatagaagtagaggctccctaagggcccactttgattaaggggctctctaggaccaagggctgaggctacctaaaaagctctctgccacaggatcttgcacccaaaggaccagaagcctccctctggggaggtaagataaaccacatgaatggtggtgtgggggaaccgggcgcccacccactgcacagttgcattagacgtggtcagtggagggtcacgagtcctgcctcccctcccaccgtgggcagcagggttggggtgccccaggctccactgagccctgctcatccctgccaccatctctggggctcagaagcacccagacggcaccctgagaccaatgtctgcaggtctgcaaggtggcaaacctccagggatccttctggctgagagggaaaggtggggagacagtgccaatgtttgcaatgcctggtaacagcctcggggaccaggtacctggggaatgtgcccattgatttaggggctgtctccaccccagttcctgctacaaaagaggccagatacatactctggggcctgcctccctggagatgaggatgagacccctgtcccttgctgttctccaacaggtgctgggaggccctccttggcttaggaggacacttccaaagctggggcgccccaaggaggcaccagtggccagaatgtccacgcagagcacccaccccctgaaacctgaggccccacgtctgccacctgggatccccgagtccccgagctgtcagcggcgccacacactccctgccagtgagtttcgctgcctcaccccggaggacgctgtcagcgcctttgagatcgagcgtgaaggtgagtggccccgcacagggtcagagggatgctccactctggtccagttatcctgtggggaggagacccttagtctcctgtccttggaggctgggtcccagagtatcagaccatgtgtgcgctcaagaaagtgggggaaacagcagccctaacccccattttcctgtggggaacggggcatctgagtggacactcggggtgcagcagacagtggacgcgaggcacagcgactaccagtcacccacctgagcctcctgccacagccttcatctccgtcttgggcgtctgccccctgtacctggatgagatccggcacttcctgaccctatgtccagagctgtccctgggctggttcgaggagggctgccttgtggccttcatcatcggctcgctctgggacaaggagagactcatgcaggtgaggacagggctgcgacgcccagctccagggaggcctctgaagacagaggtcagccagatggcggggaggggagcccaggggctgggatttcttcctccagaactggagagatgagtacaggccacaggcccctcccagagcaagaccttctgggtcttcaagttttctccatggggttgggggtatggctcccaatttggggccctcctttgctggggtgggtgccctgaccacaggcacccaggggacacctgctccctgcctgggttggtggttgggggggagcacgtgtcagcagaagtgacctgggatctcatcccttgctcgctcccaggagtcactgacgctgcacaggtctgggggccacatagcccacctgcatgtgctggccgtgcaccgcgccttccggcagcagggcaggggccccatcctgctgtggcgctacctgcaccacctgggcagccagccggccgtgcgccgggccgcgctcatgtgcgaggacgcgctggtacccttctatgagaggttcagcttccacgccgtgggcccctgcgccatcaccgtgggctccctcaccttcatggagctccactgctccctgcggggccaccccttcctgcgcaggaacagcggctgctgaactgggctgcccacctggctgccaacatgatccccgtctctgccctgggctcctcttagctcagctgagcatggagacagcagtttccagagagtggagagagcagggctaaataaagaggagataaggtggcttctcacggcctgagctggagtggtgtgtcttgtctgtccccacgaggcctctggacctcctgtgttctgaactctgtacctgagaccgggctgggttggtaagcggggacaatgggaggtgctgtggggttcctggctcctttcctcctggcaggtgggcaaaggcaccaaggcggcatcctcacagtagcccattgctcggtggggggggggggtgtccttattctccccagcctcatggatgccgcttcccacccttagcccctagggtgggggagagtggggagcagcaggatggggcagaggcgggaggcctgtgctgtagaggcagcttggggcagggaagctggtgcagggccctctgcccatggtaatcaagtggtcatacccggtgcctcactggccatcctcagtgtggtgggtgaggcactggcacagggagtggactcgtccccgggtggggtgacaggtcccctcagtgccatccccatcagggcaggccaccctgggcccaggcagccccttccctgctctggagccaaggcagaacaggtaggggtgggaaccccagggccctaaggattcaacccagccctcccaagtggacccctggggtctcccacgtgaccccaatctgctttctggcccaactaattccccaagatgctccacaagttttctgctgtccaccgggccaaactgctgtctctgagcagctgatggctgacccctcacctcacccccaaatcccagtttcatgctacctgaggtctccgttaaagacaatgtactgccataaagaatattatttaatccatgagacatcgtccgtacaaagttagcgttacttttaaaaatgaagaccgtgatataaactggtaaaaaacgggcctgatgcgcctcgagcactccctgggagcaggccctggggtggctccgcccagtgtcgttctacctgaggtctacttgtgtctccccccttgttctctgcccccagaccatggccaaagcctttcccacaatgtcccatctgagagccttatggatgggctcacagggcagaggtaggaggagaaagaggaaggggcatggtgggcacccagccctgggggcaactgagggcacagccacgtccccagcaagggcacgctccagtagtagtgggggagaaggcaccagcagaggcagcgctgaggacctgggaagaaaaggaccctgccccaggagatggtctcagcaaggagcgggatattaggaactgagacccaagactcagagaggcaggtgccttgggtgtgcctgagcttgggtcaggatctcacaggcctcacgccccagaaaaaccccgccttaaccaaccatctcacgcggagtcagcctcgcctggcaggggggcacccaggtccagagcccgggccctgtcttgggtctctggctctctggcacacagagagcgctctgcagagggcagccctcgcaggcagaccctgttccagcagggctgaggggcagccgtgtggcccagcggtcagtgcagcacctggtccagctcatacttctcgcagaagcggctggtgaaggggaagcaggtgaggtgctcgatccagggccagttaatggggtagatgtacagccacagcacgagggcggcgaagaggccggcaaaggccagcagtgacaccaggatgagtgcccgcttgcggtacttgtcgctggtgccgaaggtgatgtagggcaggaaggcgaaggccagcagcaggccactgaggaagccgaagatgtgggcgatgttgtcgatccagggcaggaggccacagatgaacaggaagagcacgatggccgagaggttgaggaaggccttccagggcctctccagcagcggccagctctggaagagctccacgaagaggcaggcgaggaggccgaactgtgagccggccgggcccacctggggcggggcaggggagacgtggcttcaggcatcaggtgggtggcctgggccgggcctgcaccctgggtcatcccatcgatcagctcctccctggcaggcatggggacccctgaggctgaggggcagggggtcggctggagctgctggaccaaagctgggcctgctccgcccattctttcagcaaacactgagcgcctactgtgtacgtgcctggtgtgggtccgtagcaataagcaagacagacaagcctgttccaggccgcacacggtggggagaggacggacactgaacaaactagatcagtcaggtggaactgatcagactgccgacggcgcacggaggccatttcctaccgctcgacctgcagatacctagcatactgtcaggcagtgggcacggttaggaagataaatgaggcggtggagggacagggtgactcaagagcatcactgttccctctcactgggattaagagaccagccagtaagcccccagattagctgtccctccgctgtggagcccagtacaggaggggcaccgtgtccctctggcagatcccaggtgggtggaataggagcagcagggctggccccctatgtgcggaaggggtcccatcctccacatccttacctctgcccggtatgggagaaagatggcactggcgaggttgcctgtgatgccactgaggatgaagatgatggcgatacggtgccagccggccagcttctccaggtccctcaggatggtcatttgaaagaccacagacacgaggcagtgcaccacgctgggggagggacacaccaggcagcggccttcagccaggcacttcaggagcagtaggcttcggcaggttgggccggccatgccctggcccaggaacctttccccaggggtccggctgggtggccatcacaggggtcgggttcgggggcagtgaggagcctcttacccagcatgtaggaagagagacagccagagcctgtagaactgatctgggacctcagggttgaggaagggcagcagcccacacaccttgtccaagcagtgcacctgggagtgggcatatggtgctcagcgccccagaagcaggctgagtctgaggctccgacatgggagggagtgcgtgagccccggccccagcaggctgccatgcccagcgtcctctcctccactactccaggcctgcctcgcctcacctgggagcagagtgttgcttcctcatggaaatagccgtgcatgaactcacagtattcccgggtggtgatctcacagctaagggggtggtgaggcaagaggggacatcagggcgccgaataaccactgcccacctttgcccagagcccagcacctggctacaggaggcatcgctggcaggaagggggatgccgcatccagaaccttcgactctggagcaagcttccttcctccagctcgcaccatgggtagccccagagcaggggagcaaaggacagttattggagggcatcggcccagcggctgtgggtggtgacggtggaggagcagagggcccacaggaagccgcagctcgggggggcagtgggatggctgaggccagggcccaggtcgctcacctgcccttggtgccgatgcagcaggggcggcccttgatctcgcagtccatgtgcaggaagcctgtgtggttgctcctggcctgctctgtgcagatctgccaggagggggcaccggcagggaagtgggctgtgcagcaggcaggtcccccatccctgaccttcccagaccactccccgccagggacactcaccggccacttagtgatgtcatcgggccagatgtgggcaccgctggaggctggctcctcgcaggtcctggagacagggttcagattgggctgtggcacacccagcgtgccacgtccacctacccacgtccctgtgggtggctcagatggcatggctatgcctgaccctgaggcccagcagaggctccaggccctacctggggtcctggtggcagacagcccccgaagtccgcttctggcccagatcagacttgtccatggggggcccagtgtcatcctgccacttgacaaaagtggccaaagtctcctggagggcagaagaaggctggtgggtcatgtcggggccaggtcacccccactggagtgggcaaggacagaggcttttcccatctccccagggctcagtctcatctatgggggtctgggaaaggtggggcggggaggagggaacgtggtcactgcccttgaaggacagggcaagtggagctagtccgggaccagggtctggcaggggtaggagggagggcctgcccccaccgagcagtccttccgctgggtctggatgcatccggagtggtcattctggacacagcagcctgagtcccgctccaggtctcgctcgcgcagcaccagctgctcgatctgcccgtccttccggatgcagggtgagaacttggcccccaggtggatcaggtcaatctggggaagggaaagggaggggagagagtgagtttgagccccagacctgggaggggtccatcactccacctctgccccgcagagtctcccctgatgaggggcctgcgggtgggtgaggagcccacctgcccagctgggagtgacagggcacagggactcctggctcagatgatgtcccccagcctgggccctcaccgagctggggccaacccagaagttctcctgctggatgtacttcacgctctcgtacacacctttgttccgcagcacctatcgtggaggtagcacagaggagggcgtcagaacagtgtgggccctgggcatggggagctggggcagctgtccccaggatagagcctccaggaaggggccaggctatggtgagcaccaccctgctggggccagattgttgcggtgggagggattaggtacccacgacactgaggcctcctaggagaggctgggacccccagcatggagcctgacccgactcaccagctgggtggtgacgtgctgggcaaagcccacgggtgcgatgccatacgtgcaaatcaccagcagcgtgatgatgacatggacgaaggtcagccagtaggtgaagtagggcctgtgcagagacacctcgggtcagctgagccgagctcctatcccaacccccagtcccggccacagggccaccctggcctggtcacatggctcgcctgggctccctgttctgccccgtcaactcatctcaaaccagaggaacttttaagacgagcctccaagcatctctctcctagcttaaaaccttttgatagctttccactggccttgggacaaattccagaatcaccccctcttgctggctgcaaagctttgcctgaccgaccacctctctggcctctttgcctgcatttcctgggatgtactttgcccttccagccccagggcctttgcacatgacatcacagtttgtcctgactgcacccctccccaccagctgttcactctccctctctat[134 bp omitted]cccaggttcaagcgattctcctgcctcagcctccctcgtagctgggattacaagcacccaccatacctgcctaattttgtttgtctttttagtagagaccagttttcactgtgttggccaggctggtctcgaactcctgacctcaggtgatctgcccacctaggcctcccgaagtgctgggattacaggtgtgagccaccgggcctggccattgcttgttattttctttttcttttctttcttttttttttgagatggaatttcgctcttgttgcccaggctggagtacaatggtgcgatcctggctcactgcaacctctgcctcccaggttcaagtgattctcctgcctcaagcctcccgagtagctgggattacaggcatgcaccaccacgcccggctaattttttgtatttttagtagagatggggtttcaccatgttggccaggctggtcttgaactcctgacctcaggtgatccgcctgcctcggcctcagaaagtgctggaattacaggcgtgagccaccgcgccctgcctgcttgttattttctaatttgggcccagtgtttattgggctgctgcaaatcagatgccctgttcttccccaagggctctgcatagcctctcccagagtcccctccctcccagccccagcttcttcttttaaagtagaggtagggtctcactatgttgcccaggctggtctcaaactcctaggctcaagcaatccttctgactcagcctcccaaagtgctataattacaagtgtgagccacggcgcccagccctggccccagcttctaactgtcctctgaccgaccctgccctccctgctccaccctctgggggttccattttagggcctgcaggcagtgacactcaatgaacatttgttgactgactgctgtctgggagcaaggctggggaccaggctcagaaagcatggggtggaagagaggcagcaagcacccctggcccttcccaggtcatgtgcacaacccttgggacagggtgcgccttcgagcttgtcactacactcctgatccgcagaagatgctcatgaaacacttgctgaatgagtaagggggcgcttcaggagggcccagaggaatttggaaccttccaggctctcctgggggctccagggcgacacctcaccggtggctgtcgaagctctccagctgccgctgcacagtgctgctgatgctgcggcggtagctgcggttcagccagttgcccaccacgccgaggccgtagtgccgcttcttccgatcaaaggcaaagtgcttcaccttggaggcgatgcgcttgccgcgccggggcccggggactggggctcggccatactccttcctggtggggatggtggctttcagcctgaatcccccaccaaaatactcccagaccccaccagggtgctcagaaggggcttgggggccagggtgaggtctggggatgcccccaggctggtggctggcctggaggagggactctgccccagcactcacagagggatttgcaccccatcgggggagacaggggaggctgagtgtgggatccctcggaagtagctggcagagagtgggggggactcaaagacatcatcaggcatggagctcatttcttcctggggtgggggacaagaaaatacagtgtaaggagtctgtcccaaacactgccccccggaacctcaattcaagggcaggacacagctgaacagacgggctcttcacaatgaattgggaagccacatgcccgtcagccccaatggtgactttcccgggtggcactgtgccccaccgcaggtcttcaccctacccaacagaaagatgggggcccagcagctccacataggaccatgccacatcccagcagtgggcctctgggtccctcaggggttcctgaatatgatcaatgccaaggtcacctcacccagctcccaggccaccccacccaactcctgctgtcccacaccccatgcttgccttactaaaaaaggaggagtcaaacgtgtctgccccatcgaccacatcctcctccaggaagctcgggaaggcaaagctgcgcttgaccacccggcaccgctgtccggtggcatccagcaccgagcgcccctgtgcacgggcagaggcacagccatcaggaccacagcctggccacctaggcccccagccccaacaccgaaggaatcatcaagcccatccgcctgcaggcagcgccttgggaggagggatcctgcccaaagcgtggagattctgcaagctgaacgggcaagaggagctcctgagactggaaggccaggaaatgagacaccagcttccgttggcacaccactcttggcacagtttggagtcacctttcccttggtccctgctgcccctctgccttgggctgctggtaccctaacactcaaagcaacccacattctataccctcactcccgaggcttgggccatgtctccctgtccctgtttcttggcacggaataccaggtccctgcccacctttctgaccccatctcctgccacagctcctataaccacccttcactaaaaccacatcaaaccgcctgctgccccctcaaagcactgtacttcctctgggctcctggcccttgcataggccattccctctgctgagaatgctgttcccttccttccctagtgaacgtctccttgtgtcttctgggcttaactcaatgtcttccctgataacagccgctctcctaaactgaccaccctgaatggtgaccctcaccctgggctgcgagctcagccaggatggcgatggctctgcacgcggtgcccagcacgtaacagggacttggaaaacccgggtggatgaggagcaagtatgcatctcacttcccacttccccagcttaagagtcagtgcagagaccaggttccaaaacttggcagggggtcacacgagatttaagacagaaggatggacgcctgggtgctgggcttcggggtccctctttgcccagggatcccagcacatccactgtccttggcaccgtaggcagatgcccaggtgagctttaggggatgctactatgaggagtggaagggaggggcaaggaagggaggccgggcagaggtgggggccctgcaggagggagccccgcaccttgaggagggcagcggcagcttgcaagctcatgtgggccacagacattctcttgcggcgtggcaggtgggagtagccagaacggacactggtgaaggaggtgagggacaggactccgggggtcagcggtgggtgcggggcgtggggcctgtccatctcctccgggtggcggaaggcccggccccgggccagcggatccacaatctggaagggaggggggcggtaagcagagccattagggtccccacccctgcctcctttccccatggatcccaccttgggcatcttgcagggctttggggactcagtgccctggaaggacggtgcctcctggctggggagctccaggtcacgctggcacgaggccttcaggcggccgtagcgcatgctgcagtggtgcaggctgcggcgctgccactgctgccgctgcccctcccagtcgccgctgactccaaaccactgggctgcgcccctgcggaagcagacaagggacaggtgggcatacgcttgtctacgcctgtgcacctgagtgtgtggaaggggtgatggcacgtgtgtgcccgcgtgcctacagggaggtggggggcggatctgcctgtgaggcccctggctggagcccagtgaccagatgagcagaagcaggggatgacgggagcgtgaggagccaggctagggccccaggcacccccacactgatccacccagctcctcgaagccccccagcctccacaccgtgatattccgcaaagcacatacccatttccccatctataccatgataataggccacagggagacattgctcattaatgccggcctcctccttccagagaggggacgcagggaccaggcccaatcatgtccaggccccgagaatccacaggttgctgggtggggggtgctgggcttgggtgtaggggggctcacttgcggatgctctgggacagtgaggcctggcggcggaagccagggcgcttctctgaactctcctgccatcggctgcgtggctcctggaggctgacgctcttcaagtaggctgggttcttcctcttggggaggaaggagggagggcaggcggtggtgtgtgcagcccaggtcctgggctggcttttctttagcctcctattctgaaaaccctgagaacaaacttcaaccctgatttatgccccaatttgctttcatttggaaatatatatatataatgtgtgtgtgtgtgtgtgtgtgtgtgtgtgtgtgtttgtatatgtatatatatatatatatatattttttttttttttttttttttttttttggagatggaatctcactgtattgtccaggctggagtgcagtggtgtggtctcgactcactgacacctccgcctcccaggttcaagcgattcttctgcctc[217 bp omitted]ctctgttgcccaggttggagggcagtggcaccatcatagctcactggagcctcgacctcccaggctcaagcaagccttctacctcagtgtcctaagtagctgggattacaggcatgtgccaccacacccagctcttttttaattttttttgcagagacagagtcttgctatgttgtctagtctggtctcgaactcctgggctcaagtgatctggctgcctcagcctcccaaagtgatgagattacaggcatgaggcgacctcgcccagcctcattctgaatttaaaatcgccattgtctaacttttctccgtcaaggccagcgtgtgttttcctaactcctcatccagtccctcccctctgcaccatgacgctcctgcctgctgctgtgtcttctgcagagctctcgggtgaacggggggcgttaacatcgcttccctttatactccagactgtgcaggaagcccacgctgccacaagccggttttcaatgagctctttatggggcactagaccagactgtcagaaacactgatctgttctcgtcctcccaaaggaagcggacactgcctaggcgggctgctgatgccagggagacactgtcccctgctcacccatgtcaaagaaagcccccagccctcagaagagagactgagagtccaggcctagggggtgaaatgagaacagccagggccccagggttaccagcaagcactttcttggggctggcccttcctgtgtgcccctgaccacgatgagagtgagcccggttcctggctttactccctgtgatatttcgggcccaggaaggagggggtagggcccgagtcaagggctgcacagacagcagctgtggctcaggaaggagcccctctgggaagtgaaactgaccagaaagtgtcacgtgggtacatctgttacctacggcagaacagtgagcccccaggccagcccccttacctcaggcagcatgctgtcctgctcgccaggggcctgggtctctttctcgggtggcgggatggtgatggagaggttgggtggcttccggctctgcaggcggctgctggacacagaggacacgctcccgccattcttgtcagcagaggccattgtgggcaggaggcgggagggctggaatggagaccgggagagcagcggtgggcggtgcggggtggcgcagtgtcaggaccctgacgccagggcacgcagcccagac[224 bp omitted]gaggcaggatggcttgaacccaggaggcagcggttatagtaagccgagatcgcgccactgcactccagcctggcgacagagcaagactctgtctgaaaacacacacacacacacacacacacacacacacacacacacacacacacacaaaaccaaaaacaaaccatccctggggactaaacccagcctgaaccaggctgaacctcaggcccagtggttggagtgaggtctatttctgaccatcatttgcatcccggaccatatgggtctgggaggtcctcaacttactacctcattcaatttctgatctctccgcttgaggcaagaaccaaaccctgaaaagagcatgaagatgcaggccagggacggtggctcacacctgtaataccagcacttggggaggccgaggtgggccgagagatgagaaacctactgtgctggtccctgtcccccaaggccacccagtttatttttcttgtcttttttctgtagaggtgggggtctctccatgttagccaggctggtctggaactcctgggcttaagccatctgcctgccttggcctcccaagtgctgggattacaggtgcaagctcactgtgcccagc[132 bp omitted]taaaaccctgtctctactaaaaatacaaaattagccaggtgtggtggcgcatgcctataatcccagctacttgggaggctgaggcacgagaattgcttgaacccaggaggcagaggttgcagtgagccaagatcatgccactgcactccagcctgggcgacagagtgagaaaatgtctcaaaaaaaaaagataactgaaactgccacctgtctggcacttttctcccccatagtgagaacactgtttaacaataaaagtggcatatgctcattgaaaaaaaaaaaaaatcacacagctgtgtgtggtggcttacacgtacaatcccaacactttgggagaccaaggtggatggatcacttaaggtcaggagttcgagactagcctggccaacacagtgaaacaccatctctactaaaatacaaaaattagccaggcatagtgcctcattcctgtagttccagctactcgggaggctgaggcaggagaatcacttgaacccgagaggaagagattgctgtgagccaatctcattgcaccctccacctcccaggttcaagcaattctcttgcctcagcctcccaagtagccggggttatgggcgtgagccaccaagcccagcccacactctatcattttacctgcattgtagacatctttccctgtcaacacatacggacagacctactttttttcttttttctttttttttgtgatggggtctcattctgtcacccagattggagtgcagtggcgcgatctcggctcaccgcaacctccacctcccaggttcaagtgattctcctgcctcagcctcccaagaagctcggattacgggcatgcgccaccacgcccagctaattttgtatttttagtagagatggggtttc[132 bp omitted]aaagatttcataagtggaatgcaccaagatttacttaagtccagactgctggttatttaggatgtttccggaatttgagacatgggtctgatgttgcaactaacacccttgcatacaccgcgtgtgcttgtttaactattacaagaccaagttctggaagcagaatggctgggttgaagagtaagtacatcccaaatttcagtggctgttgcccagtaccccatctggggctttcctgtgcgtgtgccaccagtccccagttcccctctgactccaccagaattaacaccctctgcctgtttcattctcttcgtttcgtctcttgctctgccccatgaccgtcttcttgttaaaacccccagctgtggccgggcgcggtggctcatgcctgtactcccagcactttgggaggccaaggt[131 bp omitted]gaggtaggagaattgcttgaacccgggaggcagaggttgcagtgagccgagattgcaccattgcactccagcctgggcaacaagagcgaaacttcgtctcaaaaataaaaataaaaataaaaataaacccccccagctgtttcctctccttcacatcccaaggttcctgggcaagttttgtttttcctctccttgtacgaagccagggactccatacccatctccctgggagcccttcagccaagggcgtgtgtgggctgaggcgtggcatgcacgggtcggcgagacagcagccatctgaacctgtcctcctcctccatctctacctcacctccaccatctccacctcacctccaccatctcctcacctggaggctcactccactctctcaattcctctacctgctgcctcaagccccctgagactgatcattctccgcaccgcagctggggtcacctcccaaaagcatagatcacacctgttgcttccctgctcaactctctcccaggatttcctgttctcacccaaagtccaaacgtctcactgggacttccaggacctctcttcgtctcttcctgtgcccttgcttacccctgacccagctttcctgggcccctcattgtctcaaactggccaagctctgctgggggtggggttcatgatcaaaagcaatggagccggcagcgcatactgggccaatggtcttgcatttgctgtcgggttagtcacctgacaactcatcacccaagtcctgacctgcacaagggggagagtaacggttcctccccagagaagcgtctggaggagcaaatgagtggatgatgtcaccgggcacagtggctcacgcctgtaatctcagcattttgggaggctgaggtgggcggatcacctaaggccaggagttcaagaccagcctggccaacatggtgaaaccccatctctactaaaaatacaaaaattaggctgggcgcggtggctcatgcctgtaatcccagcattttgggaggccgaggcgggcggatcacctgaggtcgggagttcgagaccagcctgaccaacatggagaaagcctatctctactaaaaatacaaaaaacattagccaggcatggtggtgcatccctgtaatcccagctactcgggaggctgaggcaggagaatcgcttgaacctggaaggtggagttagc[132 bp omitted]aggcaggagaatcacttgaacccaggacggggggtgtggttacagtgagccgagatctcgccactgcactccaggcctccagcctgggcgacagagtgagactccgtctcaaacaacaacaaaaaatgagcagatggcttcacacactgaagcactgtgtccacacagaaacctggacaggaagtgcccggcagcacggctctgcagagccggagcaggaaaacagcacaagcgcccgtcagcagatgaaggcacaaatataaaatgtggttgagccacacaatggagcatccttcagccacaaaaggaaggaagtcctaacaaagctacaacgtggacgagctttgagaacattgtgtccagggacaggagccagtcacgatggccacctctgcatgagtccattcatatgaaagctcggaatagaagagggaaatctatagacagaagcagggtagtggttcttaggactgggaaggtggggactgggcagggggtgacagctaaagggtgcaggctttctttagggggtgatgaaagcaatctgaaactgtggtgatggtggcacaattctgtgaatatgtatatatatgtacacacacacacacacacacacacacacacacacacacatatagtttttgagacagagtcttgctctgtcacccaggctagagcgcagtggtgcgattttggctcactgccaacctccacttcccaggttcaagcgattctcctgcctcagtctcccgagtagctgggactacaggcgcaagccaccatgcctgggtaatgtttgtatctttagtagagatggggtttcaccatgttggccaggctagtctcgaactccttacctcaagtttgcttcggcctctcagaaagtgctgagattacaggtgtgagccactgtgcccagcctctgtgaatatatcaaaatcactgaaggttgggagcggtggttcatgcctgtaatcccagcaatttgagagactgaggcaggaagatcacttgagcccaggagttcaagaccagcctgagcaacatagtgagatcccatctgtataaaaaaattaaaaaattagccagatatggtggtgcgtgcatatagtcccagctactcaggaggctgaggcagaaggatggcttgagctaggaaggtcgaggctgcagtgaaccgtgatcgcgccactgtactccagcctgggtaacagagtgagaccctgtctcaaaatataaataaataaataaaaacactgatggtacactttaaatgggtgaatcgactggtgtgtgaattctctctcaatgaagcaggtgctccataatgttgggcctctgtccgagccagtcactctgtcccagaccatcacacagaggaggggctggctcttctcagcctcctggttgcagttcaagtgccctcctgccccaccttgagcagtgccggtcccacctcgcttcctgcctttttttttttttttttttttttgagactgagtttcattcttgttgcccaggctggagtgcagtggcacgatctgagctcactgcagcctccgcctcctgggttcaagcaattctcctgcctcagcctcccgagtagttgggattacaggcatgcaccgccatgcccagctaattttgtattttttagtagagactgggtttctccatgttggtcaggctggtctcaaactcctggcctccacccgccttggcctcccaaagtgcttggattacaggcgtgagccagcatgcctggcaaattttttttttttttgagatgtagtctcactctgcagcccaggctggagtgcagtggcatgatcttggctcactgcaacctctgcctcccaggttcgagcgattctcctgcctcagcctcccaagtagctgggactacaggcgcgcaccaccacgcccagctaaattttttgtatttttagtagagatggggttttgccatgttggccaggccagtctcgaactcctgacctcaggtgatccactcacctcggcctcccaaaatgctgggattacaggcgtgagccaccgcgcccgtcccttccctgcccttattcctccctctcgctccctgaattgactttcttcattcactgtccaccgctgttcagacagagagcgtgggccccgcaggaggtatctggacgtgggcacagcagccagcgccctgggtccagccacccggccgcccagcttcctaccttcgagtctgagtttgcccgcggcttcctgggtcttgctgtgaagggctttagagcatgttcttgtcttctccttgctctgtacagatgctccggtgtcaagcctcagtctgtggaagggtggctggacagacaggtggctggaaggacagatagacagctccaggccacacggtgcagcttcctgggtactcacagctggaagaaaggagggccggctccagggggcatgcccaccactgagtgctttaaccttcctcacctcagtctccccatctgtaaaatggggccaattccacctgcctcactggtaagggattaaaggtgctaatcaggcatctccgagtgccaagcagcgaggggcactggcctcagggtgttcacagccaatcacctaacaacagtcctctggtctgggaacctgattggagcagaacattagagtcaagatggcccctgttatttttctcaatattacttgaacagaacagaaacatttaactttcggccaggggcagtagctcacacctgtaatcccagcattttgggaggctgaggcaggtggatcacctgaggtcaggagttcgagatcggcctggccaacatggtaaaaacccatctctactaaaaatacaaaagttagctgggtatggtggtgcacacctttagtcccagctactcgggaggttgaggcaggagaattgcttgaacctgggaggcggaggttgcagtgagccgagattgtgccattacactccagcctgggcgacagagggagactctgcctcaaaaaacaaacaaaaccacatatttttgggcagggtgcaggcgctcacacctgtaatcccagcactttgggaggccaaggtgggggaatcatgaggtcaagagttcgagaccagcctggccaacatgg[136 bp omitted]tagtgaaaccccatctctactaaaaatacaaaaaagtagccgggtgtggtggcgggcgcctgtaatcccagctactcaggaggctgaggcaggagaatcacttaaacatgggaggcggaggttgcagtgagccaagatcgcgccattgtactccagcccagatgacagtgtgagactctgtctcacaaccaaaaccaaaaccaaaaacaacaaaataattagctgggtgtggtgggcctgtaatcccagctactcgggaggctgaggcaggagagttacttgaacccgggagatggaggttgcagtgagccgagatcgcgccactgcactccagcctgggtgacagagcaagactccgtctcgaaacaaaacaaaacaaaacaaaagaaccccacatatttaacattcaaagtccaggaattactaactgccttctgatacttaaggcaaagttcaaatgatctggaagtgttttgttgctttgattggtaatttattgaacttaaaagtcacacaacataaaatcaaccattttaaagcacgaaacccaggggcattcctgttttttttttttttttgagatggagtctcgctctgtagcccaggctggagtgcagtggcatgatctcagctcccttcaagcaccgcctcccgggttcacgccattctcctgcctcagcctccggaggagctgggactacagacgcccgccaccacacccggctaattttttatacttttagtagagacggggtt[145 bp omitted]ggggaaccccaagatgccggaagccctcccggggccgggcaggatttaagtccttaactgtgcggggccttgtttggccctttacacacattacccttcaaaacaccttccagggtgacattagcgtctcttccattctgtagatggtgaatggaggctcagaggggtttggtaacttgcccaagctcacatagccaggaaagggtgtagctaggacgcccgatgtctggctccagggcctggaggctcctaggggacgggctcctcttgccctaagactggggctagaagaccccctctcagggagccagagagggaacttggtccagcattccagcgctttccaaaccaagctcctcagaggcctgggggtccccagcggtgcccaaggggctgctatggggcaaaccagaggctggggagtagcccacgctccccattgattccactgagcaatgttccttgaccccctgcatatttgggacatttggggagcagaatgctgggtgcagaggagaaatcttgaggcggagctaggatgtctcccgcttctttaaggctagtccagcagcgctggcttcgcctccttccatcccgaagtgctggggagtcctgaccccaccccccagggcagactgcccggctgagtatgacgaggtcctcagagatcaacccactgggctgggttggtgccaaggagccctggcagccacaccgggaccccactcggttgaagctgtggctaggtcccctcatcctaagcctgctctggggacagctccaggacaacagcctcacctgggacctctgcaagaaaagttcatagcttggcctcctttgggaccagggtacaccaagagggcatggggagggcactgccctggggaactggcactgggggatgggaggcaagcagtggaagcagctgggtgcaagggtggggcctccagactccagctcagttaaggtcgccaagcaggtaggatctttctggaacccagatctgatcacacctccctggaggtcccttcaggcctgccctccctgccacaccctcaccagacaaaacacttccctgtgccatccccaagctctcacctcctctcatctgaagcgctgcgcctggcacaccaggctccaccttgcctgcctggccaagccctactaggaaagtaaaatgtcacctccagagagaatcaaccactttattgcctgctctctccagcatctcgcggatttacctacatgtaggagtcccctacccaaccccgggcagcccaggatcctgcacccagtgagccctcatcaatggctaactgaatgggaagctagtgagagggtggggctggcggtggtcagcctatgtcagccctggacagaaggggtctccctcatcctgcagctggtccaggaagcagccctctttggagggctccactgagagctcctgccctgctggctccgtacccacagcagggccaggatggaggacgctgcatgctgtgccagaacgagtgtctagtggacctccccactagactccccactagactccccacctagctccctagcccaccacaggcaccgcttttggttctagggttctgcccagccagcctccctgtcccaaggccaggccatcccagctgagacccctgcccaggatccgctgcatggctggcatctgtgccaacctcctgatgagagaggctcccaaaacccaacactgagggagaggagagcctggtcagccccagggcaatcagttgggggggggtcccgaagagaggtggcctgacaccagacagcagagacagggccagggcgggtgggcatgtcttcctgggcaggagcctggcatcgggagtgccatctgaaccgcagagcacaagaggcctgggcagcggcctgagagcagctccaccctctggcctcagttcccttctctgagggaatgggacaaggtcacggcccagctttgacacccatgaagcctaaacatggagtatggaagcatgactttgcaccagccactttccaccattgagatcaactgcctccaactcgtgcagaagttggggtgggggtgcaaaggcccagccccttccttggggctcagcggggaaaggagtggggactgtcagacccactctggccttcctcatggctcaagtccagatggcaggaaccagacagaaaaaagcgctggagagctggagctaccccacccagcacttatctccgagccctagagatgcttgctcactgcaggggaaatggtgacatcctgggaccaggcttcctcctggcccgcagtcacatccgccgctctctctctaagacccccaggcccgcctccgcacccagcccacaggcggaacactgccacctgcccagccagatcctggcctcactgtggccaaccccagagaagggccttcagccccagcccagctgggagatgccaaagagacctggggagagggactggggcttagggtgggacagactctatttcctcctcctttagggtggggcgggggaaatcctgaaaaaaagtgaagtgcagagttcagatcacccccaggtcccatgggttgaggcctctgtaccctcccctgcccaggctcagggcctcccccactgcagatagctttggagacagcataacccagctggcagcagcggacctcagacacatccaacgaaacacagactcagacaccatttaccactgctgcccagagaatctggtttccccacaaagggtgaggccaggcactcccaaccaagcctgttccgcacagctgggtaagcaaggccacccccagggaggtccccaacagctctaccagccagtccaggcagggtacaagggtccccccgccatgcggactgtacaagccacactcctccacgcgggcccagcccactgcccctcccaactcccccaggtgcagttccctctctccacctggtgccaccaatctccctgcactccccacccccacacaagtgggtttctagaagctctgagtcttgctaatgaagggtgcagtccccacaagccctgggctctatgggctttatggggcagggcagggagagcgtgacaggtgcagcccagagggaaacaggcagaggcttgatgcaagggctgagcctgcgtgtggccagaaatggggacacaggggtgggacgggacaggcccttggataagaagtaagcagccccctcccctccagacaggaaagagggagaccattattatccactggatatgaccaggaagtttagggggctcaagccatctgaagacaggatgtggggaaaccaccccctgggcgggaagctgcttccagcctggctccggagccgcgggtgggcgaggcgtcacctggtgtccctgggagtgggcagtcaggacagaaggagggcggtgggaggcttggggccacgtcttcgcggctgaatcacaggatgctagggtgagggctggggacaaggaaactgcttctctccccagctcccttgccacagaaactgaaactcattttccctgcctgtggccctgctgggaaccagggcatttttagaaagctgcaaagaggaagctgagcctcacccactgtgcaatccccagcaaaacccgtggtactgctgaccccggggtttctccagccccagaggcccggaaggacagctcatggcacagctgttcttacacctccccatgcatccccaagctgggcctcacgtagccagtgacgctgccctggcaagaggtagaaggggcaagagtaaagggcaggaaagtggcaagaaggctggctgggggcctgggggcagaatttggggagagtcatgagaggcaaaacagaagggcagggttggcatgagctgcggcgtgagctccaccggcagagttagcagaggggagagggggctggggactctgagggtgggacacccagctgtctgtctccaggagccaaacaggagccactctccctccctctcagcaccacctccccagaggccggagctggtggcaagtgggcgcagacacgatctcaacccactccgccggtacacgcttcagcccacagctgctgatggagagaaacaaaacggcctgtgggttcacacagctccccagacatcccacgaacagcgggtcctggcccagagagctgtttctttctcctcctcgcccctccagggcttgcctcgaactcagttcagaagatcaagaacccccaggggcagcttcaggggactgaccatcccctgacttctctgggctttttcctatccggccccaggctctgggctccccttaacccggttagagtggctggggcgtcataagccaaccacagacacgggaagcgggtgctgtgctccagggagccgccaagatcaggggtgtgaggtgtgaacctgtgtgtgtgtgttgcggggggctggggggtgacatgtcatgttcttagggtggtgcagcccctgacgccccctctgcaccaaccatctgggctttctcaggaccagttgccagcagggatggcagagatacaaatgccccctcctcggctggggttcctggtccaggaagcaggctgagctgggggtgctggagtcctgcatccccgaagcccaatgtgcagcagctgctggcaagacacaggggtgggcaccaaaggaggtggcagtgcagccaggcctcgagctggacacagcgctgggccccacccaccacagtgccctcccctggaaatttctggatttcaaaagctgctggtggaggctgggcacagtggctcacacctgtaatcccagcactttgggaggctgaggtgggcagatcacctgaggtcaggagttctagactagcctggccaacatggtgaaaccccatctctactaaaaatacaaaaattagccaggcatggtggcgggtgcctgtaatcccagctactgaggaggctgaggc[131 bp omitted]ggaggcaggcaagtggcagcagctgggcggggatgcaggtgccttccacatcccagggaagaggcagcagctcccgagcctggggctggactgcaggctttggggcaatgaagggaagggggcacgcacagcagccgggccccagttctcctgctccctcagcatcgttgtgaaggggaggagtcagaagtggcccctgggggccaaaaggccctgtccatttggggtcagacaccaggacactggagggtttccggggtggggtgtgcaccacacagtgccacagcaacacaggctcggtgggaactgccctttgctgcaaacgttcatgaaagtctgcctctctgcatcccggcagccgggttttcacgggtccttggaagcagtggtggtccagcacaagcccagcggttggggcaggatgagatgcagcctggggtctgtgtgagaggtccgtttcactcctgctggaggctccttgacactaaggtgtgaccaggccatttccgtttgtgactgtcccatgtacacagacagggcactgtcctgtgcttacaaagtaggagcccacccggtttccacctgcctccagacagtgaaaatctgtcccgatggcagaagacagggtcacaggcccatctctaaccactgtgcgatcttgggcaagccacttaacatctctgagcctcagtttgtgtatgcataagatgctagtatcctcccagggtctaagatctatgtgactttgtcaccatgaacgagggctcaccccaggaacagctcagctgaggtacaaggtctcacctattgtacagagaggtaagcaccttgcccagtgccacccagccagaaataggcctggactggctgggtgtgagcatgcagagcccagggagccgacggcatccctgggccctcacctcgacacactcagagcgcttctggaggcccagttctgcctccggctgcatggagcccctcagcagggagggaaaatgccaggcagacacttctgagcttgtaaacggtcattaaggaactaataaacctgatttcccagaacgttgccctggggctccctgcttcccagggaagaggctggccctagccccagtgactgccagggtttcaggacacggggacaccaggttgcttgtcccaagcaggcctgcaaagccacgtgcttatggcccacaccttgcttcggggcagcgtggagctctcttgctgaggaatgaggaggaataaggggccagagatgggactcaaacctgcctgggccacctacctgctgggagactttgggcaagtgggtgctgcagagcctgcctcctctgctgtgagatgggttgatgccccaccacggagggagccagggaagatgacagcagatatgaatgtacagtgcctggcacacacccaacgcccagttggaagtttcttttattcctggctgagctctgccaccatcgctcacttagtctctatctgagccacgagccccacaggggacagatctctattcgacaggtggggaaactgaggctcagagagatgaagtcacctgtccaaggtcccacagttagggaggtggtggggctacaaccccagccagggtcccgcgctcttaacctccacactctgcagcctcttgccaccctggaactggtgaggggcaggagaaaaagaacgggtgaggactctgagtgtttggggtgctggagtgagtcctgcatgcaaaggcctttgattcatgaagaagggacagcacctaactgcctgggcagcactgctcagcttgcaaaggacttttacagacatgatctcatttagttgaggctaagggtgagaggcggctgtcatcatcctcacgggctggcaaggtcaaaaggggcttaggccagggttcaaagtcctgttcccactccaaaccccacagcagatcctcaaccctcctcttccagatctcttttttttttcttttattttttgagacggagtctcgctctgctgcccaggctggagtgcagtagggtgatctcggctcactgtaagctctgccttctgggttcaagcgattctcctgcctc[224 bp omitted]acccactgggagagggaaaagggtttcttgccagagaccggggcaggaagccatccctgcaccacctgctggcacagggttggcggccacacgggggaggcagaggagaaaaccaagacttgaggcagctttaccctgctcccagccccaggaacctacgccagggaaagcacagctgaggggcaccaactccatgagctgccccccaccccactgtcagtgacacacacacactggcaggccaggaaaacccctgggcagaggtcagcagttcatgcccagatggaaacccaccctcacttcccttggccagcaaggcactgaggtccccctaccccagacacagccactcctacagaataacaataacaacagtgccactgctccatatgcgtgttcccatctagtccttgacagcccacgaggcagggcctcggccatctcccaagtctgtgccatggaccggcagccacgcccctacctgaagccaccctaacaccattatcacgatggctccccgcactgctcctgccatggccgggcactgcactgcaggctgcacacctttaccacgggagtcctcacctcacacaaccctccaggtagattactgttagtgagcccactgtgcagctggggaaactgaggcacagactaattaagtgaactcatcctactgagcacacacatggacgactgtgcccagcagcccctggaccttggcccagctcctgaagtttggaatcctcctccatccttttctgctggtcacaaggttcccctcacactccaaacagtgtctctggcccacctcctgcactgcccacttggctgaaaccactttcctgcaggagccgggcactggggctggaactgccttccagtagcttttggaccacaaacaactcccagctgggcgcccggatacatttgctgaaggaggggccgtggacacggtggcgctttgtacttcccggaagatgtgtttttccttacacccatcctaggtctcctgggaggcaaaacgacgttccgggcaggcttggtttccctgtgaagccgcccgtgccctgagagctgtccctgcctagccaccaccaccgccgaggtcagcctgtacttgggcaggcgcagacgtccccgccactcctcccccagcctggctcagctggataggaaactgggagccgcttccgacagccagcgcttccacagccggtgcagatgcctgagctcactctggaaatcccctggggcagatggggcagcgccgaggcctgctccagagtgcgaggcacagagatctgaggagagtgtggagggggagaggcagccaggagggcacacgtcttccctgtgctgtgccagcggcaggcgggggccaggcccaaagggaagcaccagccagctgagccatgccactcgcacactcacgggcaggcgtgcacagctccttgacttctgctgtcatctgtcaccttgtctggggcagagtttacacagcaaggacagaaaccttggtggagaggccaccacagtatccagagctgaggccacaggaaaaacagcaccactgaccccagagcaggactcgggccccaagtgcgtcacccaaagcatttgtagtgtgatttattcctcctcttataggaacaaaagtccccctcctgggctggagagaaagagagtgtgtgtgtgtgtgtgtgtgtgtgtgtgtgtgtgagtctgtgtgtgtctgtgtgtttgtgtgtgtctctgtgtgtctgtttgtgtgtgtctgtgtgtgtgtgtggttacaccaggtacagacaggtaggagtcactgagggtttgttcgtggggctcttgggtggggcctgagggtgggcaactgggttcacacccgagctccactgccgacttcctgaacaactttgtacaagcctgggtgctcagccctgtcccttgagaggctcacagcaatggaggccacttttgttttttgtgcaaatgaaaaggtgggagtttcacttcagccttttacagtcaagagaccaaaaaaacaaaaacaaaaacaaaacaaaacaaaaaaaacaaaagccaccaacaccaacaaaaagaacccaagctcgaaacctccaccagggttcccaggcaagaaggctgggtccagaagtgaacaggatgggtataatggctactgcaagaaaacagggagggagggcagcgaggtggccccagctcctgggcatggacgtggctgcttcatccgatcctctcccaccgtgccagccacccctccttgttgccagaaaactggaagtacattcctccagcccaatacaaacaactctgagtcatccctactggggggccacctggcctgtgctttgatgtctcccatctctcacctctgctcagctaacaccatgggcaggggtgcctccaccccatcagcagctgggcccactccagggctcgtcagctaacccagggtgccctctttattgcaggacaaaagcagcctggggaccccccaggaattaggagccctgatactccttggatgtcactttcaaaaggtgtacataattggaggagttaggtgtgagttcagaagggaaaattccagcaggtcacatggtatcaggcaaccatgccagcttcagcaatccagctttgggaaaatctatgggaagagagctcgccctctgcccaccctcccagcccagggatatttgagctcaagggctgcctcagcccagccttcctgggagattgccctggggttaagcaccccaggcctgggctgcaagggggtcctctgttcccaacctctcccccacagcacctagaccagcttcctgcagggccagtggagattgggaaaggcggtgtctcatggcaccaaaggaagactcttgtgaggggaataagtgccctcacactgccttacccctcatctcattcaggtttattccaagttcctcccctaaccactctggaaaactgaggtagtttccccagtgagggagcatcattgagaaggaacctgatggaccagctgctgcgcagggtttctcagcctcagcacagcccaacaccttgggctggataattcctcgttatgtgggctgttccgtgccctgaagatgtctggtagcgtccctggcctctacccactacctgccagtaacaacaacactcacttcccctcccaagtgtgtgacacccaaaatgactccaacattgccaaatatcccatggcaggcaaagtcgcccctggttgagaaccacagctctaaaacacgcctccctttccactgcctgccctacggacagtgagggtcgaataaggcagatgctggtctcattatattaccagcaaatggcacacactgggggcctgatgccagccgcccaggcaacagcagcctctccccaagtggggtcagctccccaccgccttctgctcctcagacacacccgctgccaccctctcagtagctccaaccctagagccccctccgttaatctttcatggaatggggcagggccaaaacctaggcttcctttgcgccctggcgtgggagtggggcggggtctgtaccctagggaacttatccgtctctatcccaatgccctgggggaacatccgaggggccaaacaggtaaaaggcaagcccagggccaaccttccccagcccctccatccagaagtcaggactcctgggtccaatttctgagctccggtccagccctgctgtgtgagtccctcatccccacccccgcacctgtttccaccttggctggctcaaccaacaaacttcggccccggtccgcccggtgctcacccgggagaaagtggaggggagagaagggtctgaactgcaggcacttctgggacgcaggcgggactgccctgcgcagtctcctctcttcctccggaggtttaaatctctgcccaatcgtcttgcccctacatctggcgccccgtcgcccagggaccccttaggcgtcctgtccgagccgagccctaggggccagcagaccgggtccagcggccccgccggcgccgtctgagccagcccgggcctccagccgagcccacgtgggacccaggcgctccgcagggcgggcaccgggcactgggcacccttcctggccgcgcaccaccgctccagggcaggctcgggcacaacctcgggacccttccggcgcctgcggctgggcggccgtgagtcctgccccgctcgtcgccccgcgctcacctccctgcggccccaagtccccgggacgcaactccgtgcggcgcctgcgagcggctgggcggtggctcctcgggggcggggcggcggcgctccgcctcttccctacctgcgcgcgggcggccgggaggcggggctgggctccagggggcgtggccgggctcatgggggcggggcctggacgcagtctttgctcagtcggcttcctgggttcctgcctccgccctccacccagctgggtccccgcctgggcagagccctgttttcgcctgagctggtctcttcagggcgccgtcctttccctcttggcgtcctcactccaccccagaccaaacacgtcatctaggtcttgattgccgtcttcaagtcgcccctccccatcaagaaaaagcacccaatctcccatccccttcttccagcgccctcatcctcaggccaagtgggcctgttcccttgacccttttagtctgtagtcacactctctccgggaagctgggcctgaacacctcctctccctcctggaccctgaggcctctctcctagctctgctgtgcccttgggttgggaacaggcactccgtggaggtcctatctgcatttgccctgcagctaaggccaacatttgtgactcctgccaaccccctacacaccccgtagaagcattgacagaacccacccagctctggcccttccagctgccatgcgggccagagccagactggagattggggacgctggcgacacctggccccttggcttgggtctgtctgcccaggtggttccttctctcttccctggactccaagggcctgcctcttgggactagacaaacaaaaccttggccagggcagctaggaccgaactccaaggtctggatgccccgttctcagccccagcgcttatcatctcgccgtccctctccaggaggcctggctaggccaggaggagcagagtttgaagagactcaggcttggaggggtgggggtggggttgtcagggccaaggcaaaacctctggcccttagagagctcctgagccaccctgccccccaacccaaggactctggtgtttattgctgacctgggtggaggtggggagcacctggctgctggagattatcctgagagatgcatctctcctccccagctctggggccatgaggagggcacaggctggaaggagggggagtgggccaaagctggggtgggggttgctcctagtaacaaatgtaagggaccatttattgtgcaaccagcacatcctggggttatgtgcagagaggaacaaaaccagggcctgcccacgaagtgccagcattctacagggagacgttggaactcaatactgtaacaggaagggtgagagcagctagccattccaaagtgctttagtctgtataatccgcagtacaggtctatgaagtgggtaccattatgatcatccccattttagggatgagaaaactgaggcagagggagatgtgaggggagcagctggggtttaaactcggtcatgatctgactttagactctaacaaacactgctgcaaatgcctgagctgggttctctctcctggagctctactggaagctctgcaggagtccccaggaggggagggattcatggtggtgcttaagctggtgtcagggatttgtcccatgcaaacatggcgtgctgcccggccacataggtgcagggaggctgattacagccttggctgcagcaacacgcacctgtgaggccagagagggaagaatgttaaataggccaggggtataacttgtgataatgtcacacagctgttaaaagcaacgaggcagctatccatgtactgagaaaggaattatctccaacttatagtaagttaaaaaaaaaaaagcaagctgcatgtttagtataatcctatttacctaaatttaaatagaacagacatatatatgttggtagatccatacaaactttctggaaggatatctgtggagtaaccctgcaggggtttagggggagagagtcacttgcttttcattttgtatcatgtgcatatattacttacataacttaaagagaaacactgtctaaactctttgtttttgttttgagacaaggttttggtgtcacccaggctggagtacagtatactcatggcttattgcagcctcgacctctggggctcaagtgatcctcccacttcagcctcctgagtagctgggactataggtgcacgccatcctttctggctaactaaattttttttttgtagagatggtggtgggcggtgggggggggcctcactacgtcgctcaggctggcctcaaactcctggattcaagtgatcctgctttggcctccaaaatcggtgggattacactttacatattttacttttataacttaaagaaaaacactgttggccgggcgcagtggctcactcctgtaataccagcattttgggaggccgaggcgggcagatcacctgaggtcgggagttcgagaccagcctggccaacatggagaaaccccatctctactaaaaatacaaaattagccaggcgtggtggcacatgcctgtaatcccagctactcgggaggctgaggcaggagaatcgcttgaacccgggaggcagaggttgc[132 bp omitted]ttttatggacctacaggtgtagggaagatcttcacagattgggataaggaaagggatttctagtgggaagaacaagaacgaagacacagccgggaaactggctgtggtggggaagcttctggtgctatggcttggctacatcgcaggctgtgtgaggaggaggacaggagaagcctggggaggcagcgggggctcagggtggaggctgctgtgtgtctggataagggtttttactttcttctgtaagcaagggggagcccatgaggcattcttcaactaggaaattgcaccctcatattttctgcttgtgtcccctcctttaaaacatgctttcacagacactatttcatttattattattatttatttatttttgaaccgcagtctcgctctgtcgccaggctggagtgcagtggcgcaatctccactcactgcaacctcggccttctgggttcaagtgattctcgtgtctcagtttcccgagcagctgggattacaggcatgcgccaccacatccaactaattttttttttttgagacagagtttctctcttgttgcccaggctggagtgcaatggcgcaatctcggctcaccacaacctccacctctcgggttcaagcgattctcctgcctcagcctcccaagtagctgggattacaggcatgcaccaccacacctggctaattttgtatatttttagtagagatggggtttctccatgttggtcaggctggtctcgaactcccaacctcaggtgatcctcctgcctctgtctcccaaagtgctgggattacaagtatgagccactgtg[134 bp omitted]gcccggcctattattattttttgaggccgttatcttgctctgtcatccaggctggagtgcagtggtacaatgggaatcactgtagcctcaacctcctgggctcaagtgatcctcccacctcaacctcctgagtagctgggactacaggccaccacactcagctaattttgctttattgtttgtagagatggaggtctcactatgttgcccaggctggtcttgaactcctggactcaagcgatcttcccgcctcggcctcccacagtgctgggtttacaggcatgagccactgcgcccagcctattttattttttaaatcttgacaacaattctgcagataggcaggtcaggctttacagatgaggacactgaggctgctgtggaattaagaccagcgacagagtttgacattgagaagcgttggtcctcagtgagtactgccttagaggaaggcaggagaacatgccccagagagggacccaccctgggaactgcacaccctgagaccccctcaagactcactttgtgatcctcggaagaaaagggcagagggtcttgaagccattagttagcaaactcagaaaagctccgacaacacacctttgaaggacgccctggtatttgtccacgggagtaaaatattaggggtctatgtttagcttttttcatttttagaacgtgagcggccgggtgtggtggctcacacctgtaatcccagcactttcggaggccaagccggtggtggatcacttgaggtcaggaattcgagacccacctggacaacatgatggaacccccatctctactaaaaatacaaaaattagccaggcatgatcgcacatgcctgtaatcccagctacttgggaggctgaggcaggagaatcgcttgaacctgggaggtggaggctgcagtgagctgagatcgcgcctctgcactccaccctgggcgacagagtgagactccatctcaaaaaaaaaaaaaaaaaaaaaaaaaggaacagtgaatcttttgaatgagaggatgctggatgctgacttccttgtcaaggttcagagaagtgtaggactgtgcccaagaacgcacaggtggtgagagagagcagggctgggtgctgggccccacacccatactctttccagccattccggtggaccattcccatcttttggaagggccattctggctgtgctcaggacagatgggtttgggcaaaggtggggaggccaggtgagagggagcaggggagtggctgggggagcagagtagagggagggatgagaagggcatcccctctcttcggaatttagctgacacaagcccccagacttcctctccatatatgctctggatttacctccccttacccccaggcctccagcagggagagtcggcagcgggagtgggcccaggtgggagccccagagaaaggaaccacaggatcttgcccgcctggccgcagagattgatgatgcgggatcgccatctggtggcgagaagaggtaccgcgccaaggaatccacgtggtcaggggaacccggggaagccgcagtcttagtgctccccgccacctgctttctcaccagataccctggcagtccagcctgaaggttaagggcacagaggcacaggctcgctctcaacaggactcgtcagtggttagcaagatgccaaagcctctgtaacgcctctccttgccaccctgcctgcctttacgacatgccggggagggcaccagtgagtgacctctctccaagggttcatgggccaccagacccttaggcaccttgggagctgcctgccaccaggggagaagccagggtgcctggcattcctgggtgctggggaggaggcggatgtggtcagactccttaggcccagagatacttttcagctatctcctcctggtgctattccttcccccatggtgcccttgaaatccatctccacctccctcccagcaggctgctcctcaccagtgttctcaccccactgtcagccctccactgggtcatcctagtctcagccagggctcggtcattcccattagcccttgggaatggactttgaaagctattccagagcccctgtcacctgctcagcccagctgtgctcatttttcaggcgcccatcactgctgtatcttccctccccaaccttggaggcctcagtcaccctgggaggagagtgaggcccgggggaagggcgctggcctcgggggcatgcaaatgttcaggtacacccagctcatcactaattagcttgtgagattaagcaagttacttaactttggaatactgaggccaccctagaaagacatgccatccagaagccataaaccagaagattgacagattgacataaatgccaccaatttccgtgccacaaaaggcactgtagacaaagttaaaagccaaacagctgggcaaggtggcccacatctataatcccagcattttgggaggctgaggcgggaggatcacttgagtccaggagtttgagctcagcctgggcaacgtggccagatgccatctctacaaaaaaataaaacccgtctaatttttatatttttgtagagatggggttttgctatgttgcccaggctggtcttgaactattaggctcaagtgatccatctgccttggcctcccaaagtgctgggattacaggtgtgagccactgcgtctgacagttttaacttcttgatcataggtcctctctgcccctgctccacagcaaccagctacagtcctaccagcccatccacacatctccttccgtttcttccgctgccctggttgcttcaggcgtaagcccggggtggcctccatgccttccctagtccaccctgcacaggctgccagctctgtggccaccactgctcctgttccaggatctccagtggctctaggtcacctcccaaagacagtctgagctcctcagccatcgagagccccacaacctggtgccaacatacttccctggtcttacctggtatgttctccatcacagatttggctttctgtagctcccagtctctgctcacttgcctccagggtctccaccgctgacatggtctcccttcctcacggagccttgagctgctctgcacctcttttccagaactttccttgacgccccttctggacaagctccctcctctgtggtgtccacgctcatgtacacaacctcc[135 bp omitted]agctctgcctccccagttcacaccattctcctgcctcagcttcctgagtatctggggctacaggtacccaccaccacgcccggctaattttttgtatttttagtagagacgggatttcattgtgttagc[131 bp omitted]atgttgcccaggctggcctcaaactcctgggcttaaacaatcctcctgcctccacctctctagtagctgggaatacaagctcgagccatcgcgccctgtttaacgtgatttactgatggatgggatgtgaggggtgaaagagaggacagttgaggaggactccagggcttcttgcctatttaaattggcaaacagagcctccactttcgaggggaaatagccagggaagaggaggctttggcaggggttccgcttcgtccacacgaagcgtgaggggtccaggaagcagctggaggctccagcctgaatcaggatagagatgtcagggctgggatttaaatttgggattggatgagctcactgagaaaagagtgtgggaagaaaagaggggcaaggacagagccctggagccatcagccctgagtccagaataaagggaccagggagagggaggattgggagagggaggattaggaagggggaggtggcattgagctgagatcgagccactgcattccagcctgggctactaagcaagaccgtgtctcaaaaaataaaataaaattaaaaaaattacaaaataaggccgggtgtggtggctcacgcctataatcccagcactttgggaggccgagacaggtggatcacctgaggtcaggagttcaagaccagcctagccaacatggtgaaatcctgttctactaaaaatacaaaaaaaaaatagccgagtgtggtggtgggtgcctgtaatcccagctactcaggaggctgaggcaggagaattgcttgaacccaggaggcagaggttgcagtgagccgagatcatgccattgcatttagcctgggcaataagagcgaaactccgtctcaaaaaaaaaaaaaattacaaaaaaatctaatagaaatttggtagaaaggataagaacaattcacagaagaataagtaaaaatggtcaatgaatatagaagatatccaacctcactagtaatttgggagatgtaaatcaaatctgtgatgatccctagcaaccagatctccatgtctgaatggcaggtgccactcaaggaaccctggggaagtggctggctccagggccagggccagggccagggccgggcaagagcatgaggagcctggcacatgttgttcgcagcagaaagcaaggaagctttaaaagattaatggggccatgtcaaaaggacacaggagccagctggaagggactcctactggccaagttgtaacaatttgaacatcagaaagaaaaac[132 bp omitted]aaaaattagctgggcgtggtggcgggtgcctgtagtcccagctactcaggagcctgaggcaggagaatggcgtgaacccaggaggcggagcttgcagtgagccaagattgcgccactgcactccagcctgggtgacagagggagactccgtctaaaaaaaaaaaaaaaaaaaaagtcatttgttcattagacactcaaactggggaaatccagagaaactcttgggaccccaccaaagcatttattcaaccaaactcttggccaggcccagtggcaggtaatctcagcacttagggaggctgaggtgggaggatcacttgtgctcaggagtttgagaccagcctgggcaacatagcaagactcagtttctaaaaaagaaagaaagaaagaaagaaaaataaattagccgaaggtggcggcatgcacccgttgtcctaagctactcaggaggctgaggcaggaggatcgcttgagcccaggagtttgaggctgcagcgagccatgattgtgccactgcattctagcccaagccagagagcaagatcctacctctttaaaaatatatatatatatatgtgtatatatatgtgtgtatatatatgtgtgtatatatatatgtgtatatatatatatgtgtatatatgtgtgtgtgtatatatatatatgtgtgtgtgtgtgtgtgtgtgtgtgtgtgtgtgtgtgtgtatcaggcccagagaggcaaaaaaatcaagcatctatcctgcctttccagtagaaactgtatttcaaagcagccaaatagttgtccggtttgaggaaggaatgctttgctttacagaagaatgccagctgtattaggtatttctggctgcaaaacaatttatcccaaaacttagctgcttgaaacagcacacgtttattatcactcagttcctgtgggtccaggaatctgggcgtggcttagctggttcctttggctcagggtctctcatagggtgtcaacgagaagctacagtcatctcgagacttgactgggggacaatccactttgaagctcactccctcggtgacaggattcaatgtccgtctggctgttggattgaggctttctttccccactggcagttgtccagagacagggacgctacacaggagtgtcagctgggcagtagcacaggactctgggctcagaagcctctgtgcttggtttaacgctctgctgtccccacattggaaggcgtaatcattttttctttgaacttgtgtcttatagtgaagtccagctggacagtggagcatgcaccctatccacagctgacatccactggactcgcatacaacgttctccatgtccatggcacagtggtctggcggatccatgttgggtgggagtctagcaagattcaatgtgaatacaaagtaagtgagttaaggaagccactggcttccccggagtgttgggagaatcaagaagtgaaataaaggtggggtgcggtggctcatgcctgtaatcccagcactttgggaggccaaggtgggcagatcatctgaggtcaggagttggagaccagcctggccaacatggccataccctgtctccactaaaaatacaaaaactagccaggtgtggtggtgggcacctgtggccccagctactcgggaggctcaggcaggagaatcgcttgaactcgggaggtggaggttacggtgagccgagattgtgtcactgcactccagcctaggcgatagagtgagactccgtctcaaaaacaaaaacaaaaacaaaagtgaaataaaaacaggtgagttagttttgtgcagtgtttccactgctgtggtaagaacaacacacaccacagacgcatgtaggaactatgaaataccaattgtgtaattctgctgattctgcattatgaattcaatgctcttctatttgtgtgcaaaaactggcattgcacaatataaagatggatagtaaaattcatgctgacaatttaaatttgtattttaaaataaatgacactgtcatcccagctactcggaaagctgaggcaggaggattacttgaaccccggagttcaagaccagcctaggcaacagcctgggtgggggctgctggcccccctgggctttctgttccctgggaccctcatcctaactcctagggagtcgtgcatggggccactgggttcagcagaaagaacagcaggtaacccaaagccagcaggtaaccaagctttcacagagagggtgagaggctggctcgtggttgcacagcaagtccagggagattggagcccgtctgggtctcttgggaccaatctaaaaccaagcagcctcagacactgctttgctggctccacggtcaccaaggagaaatggaagaggctcttccaaggagctcttctctcccaaggcccccagagggtaggagaggcagaggctgggtcccatctcacctcccgagctgccaccgacgcctgggccctccctttctcccttggcccagatgtcactccagggtaagaagctgggagcaaaagtctctggtcactggtccccctagatcacacccctgtgctcttcccgcctcagatcccagctgccctcgccaccctcatcatccttccccgttagctgctgctggtgtggggccatcggaaggtttgagcaggggccgacgaggtcaattttcctgaagagagctttgctggatggagcctggactgtaggaggtgaccttggagaccaccggggaggccgtggggagcccgggccagggcgatgtcttcctgtcctgctgtgtcctctctgcttctctctaatggtggggactgtgggagaggctgggactttggggtcagcctgtggctcctgccttgccccgtggccgtgggcggcttgttgatgagcccagctctttggctgtaagatggggtcatgaggtgcatctctgagggtgatggaggggaacagatgaggcccgtctagaagagaccctccctacctcaggaaccccgtccttgctcatctgaactcaccccgctgttcacatgtttgcttactatgctcttcgtccttggggatggatgcttcctctggcaggccctgcctgtctgctctggcacccagatcagaagggcccagctcccaaagggctcaagaggaggaggaggaagggactctgggcggcagatccctgcctcttccctggctccttcctcctggtccactagggtagtgggctaaatggtggcccccagagatatgaggcccaggaacctgtgcatgtgaagtttttggaaaagagttgttgcagatgtcactaagctgaggatctcaagatgagatcatcccagatttagggtgagccctaaatccagtgacacgtgtccttagaagagaaacacagagagagacttgagacaagagcaacacagagagaaggccacgtgaccgcagaggcagaggctggagtgacgctggcctggcccaagaactcctggggccaccaaaggctgacagaggtgaggaaggatccttcccagaggcttcagagggagtgtggccccggcccccaccttgacttgagacctgtggcctccagcaccctaagagaatcgatctctgctgttttttgttttttgcttttttttttttttttgagatggagtcttgctctgtcgcccaggctgcagtgcagtgggataatctcagctcactgcaacctctgcctctcgggttcaagcaattctcctgcctcagcctcccaagtagctgagattacaggcacccatcaccacacacagctaatttttgtatttttagtagagatggggttttgccatgttgggcaggctggtctcaaacgcctgacatcaggtgatccacctgcctcagccacccaaagtctgggattacagtcgtgagccactgcgcccggccgatttctgctgttttaagccaccgagttcgtggtcatttgttacagcagccagggaaaccaacatcatgggtgattccctttccctaacgggcttttctggcctgcactcctggctctcctggaggcagaacccccaggtccctgccctgtcatggggctcccagctggtctcttccttcactgcttccaggacctgctagccaggcaggggaagggggctcctcagcaccccagcctggcccccaggtaggaggtctcatcgagctgtctctgtgagccaccccacttgcttcttgctctttgcctctgcccgactaatgttcagtttcttcccctgctcttctaattcattcagccatatttcccaagtgtgggttgtgggcaggagggccggacagtgaggatagagggaccgggaaaagggatcctcattgtatttaaaattttggcattttcttcatcatggatttggggaggggggaggtattttttgttgttgtttgttttgttttttgagagagagtcttgctatgttgcccaggctggtctcaaattcctgagttcaagtgatcctcccacctcggcctcccaagtagctggggctatgcgtgtgagccactgtacccggctaattttgattttaagagctactgttgctgggagtggtggctcacatctgtaatcccagcactttgggagcccaaggtgggtggatcacttgaggtcaggagttcaagaccagcctggccaacacagtgaaaccccgtctctactgaaaatacaaaaattagctgggcatggtggcgggtgcctgtaatcccagctacttgggcagctgaggcaggagaattgcttgagcctgggaggtggaggt[134 bp omitted]tgggaggctgaggtgggtggatcactggaggtcaggagttcaagaccagcctgaccaacatggtgaaaccccgtttctactataaatacaaaaattagctgggtgtggtggctcgccctgtagtcccagctactcaggaggctgaggcaggagaatcacttgaacctgggaggcagagtgcagtgagctgagatcatgccactgcacaccagcctgggctatagagtgagactctgtctcacacacacacacacaaaaagaaggcgagaaggggagccgggggagaaatgagcctggaaagatggcccgggccaaatcaggcgggctggggagccaggccaggactctgctttctgtttggctgtgacttcagtaagctagggcagggttttgatgggccagggaggagtccacgcgatctgattcacacgataaaagcatttcctgggccctgagtggagaccacaacgtgggagggcagagcggaggccgacgactgggaggaggctttgcagtcgccgggcgagacgatggctttctttcctggctcatttcacactaaactggggaccagccagaaagccttgggaacttgtcagacccacatacgctgccactgagtcaactgctactatcatccctgtgtgacctgaaccgaaacccactcacttgcgaaactgctggaggcttcttcactaaaacccatatgcatgctaagatcctggcgtaacataaaatgtcatgtgcgtgtgccgcgtaaaatgtgcgtgtgcacaggaaaaccactgccagtatttacagcaaaacactcacagtgactctcgggtggagggaccacaggggacttttattgtcacagccctgacttctgtcctgcttcagaccagactctccaaccacttcctggacacctccctttgtgcttttctttccccctcaaatttcctgcaatgttttttttttttttttcgagacagagtcttgctctgtgacccaggctggagtgcagtggtgtgatctcggctcactgcaaccttcgcccctgggtttttaagtaattctcctacctcagtctcctgagtagctgggattactggcgcctgccaccacgcccagctaatttttgtatttttagtagagatggggtttcaccatgttgtccaggctggtctcgaactcctgaccttgtgatccgcccgccttgccctcctgaagtgctgggattacaggcctgagccaccgcacccggctgcctttgtttttgtttttgtttttgttgttgttgtttgagacggagtctcgctctgttacccaggccggagtgcatggtgcgatctcggctcactgcaacctccgcctcctgggttcaagcgattctcctgcctcagcctcccgagtagctgggactatagccacttgccaccatacccagctaatttttgtatttttagtagagacagggt[145 bp omitted]tgtcatcttatacatattgcctttgtaatcatatagaatccccaggaatgctacttcaaaaactatgtataaggccaggtaccgtggtgtatgtacacctgtagtctcagctactcaggaggctgaggtgggaggatggctgagccctggaggtcaaggctgcagtgagctctgattgcaccactgcactccagcctgggcgacagagtgagaacctgtctctaaaacaaaaacaaaaacaaaaaaaaaaaactttgttaaagaattttttggccaggcgcgctggcttatgcctgtaatcccagcacttcgggaagttaagtcgggcagatcacaaggtcaggagttcgagaacagcctggccaacatggtgaaaccccatctctactaaaaatacaaaaattagccgggcgtggtggctggtgcctgtaatcccagctactcgggaggctgaggcaggagaatcgcttgaacctgggaggcggaggttgcagtgagcctaaattgtgccactgtactccagcctaggctacagagccagactctgtctcaggaaaaaaaaaggtttttgtttgtttgtttgtttgttttttgtttttttaagatggggtctctctgtgtcgcccaagctggacagcagtgtttaattttttttttttttttaagatggggtcttgctctgtcacccaggctggagtagagtggcacgatcatgactcactgtagcctcgacctcttgggctcaggagatcctcccacctcagcctcctgagtagctgagactaccggtgcacactaccatgcccagctaatttttgtaaaagaaaaattttttaaacagaaaattactgttattgttttggacaatgaacagtatttactttctgtttttggacttagacaaagtcaaagactcacttatctcccccccacccccacccctcctacccctactacagaaaaggctcaggggaggcagggatgggcgtgggtccttcaggtccctgtttgggattgggcctgttttcccccagaggaatggccactgaagtcgggcaaggagactggtgcactcatagtagctggatggcgctgtgggcggtgagcgtatcatcccacccacgtgacctatgcactcacccaccttgtgaggcccagtaattcaggacaccccggtcttgcaggaactttctgtgctctgaaggagaaagtcacccggcaggggctgctcttgcttccagttcatggtgcacggctcagtaatcacatgccattccctggccagtccaacactgtccacagcaaacccagtgctgcctgctcttggactgctggtgtgcccttctctcctcagacctccccaggtaccccacagccccggcctctcaggtcaggagctgtctcacagcattgagaagcaccagctggggtggccaccatcgtccctcgtcccttgttgcatgtcttccagctgtggcagagcccacctcccccttcccaggcaggccctttaaggtcatccccctgctagagtctgaagtctgtgtcccccagaaattcacatgttgcaattaacccccaggtgatggtgttaggaggtgggatctttggaagggagttaggtcattagggtgtcctcatgaatgggattagtgcccttacaaaagaggccctctcagagagacccttgcccttccaccaggtgaggagagtaagaaggtgccctctgtggacaagcaagtgggtcctcaccagacaccgactagaagcctccttggtcttggaccttccagcctccagaaccatatgaaatacacttctattgtttataagcagtccaggcacctggtttatggaacattgttagggaagctcagatggatgaagacatcccctcttttttttttttttttttttgagatggagtcttgctgtgtcacagaggctggagaacaatggtgccatctcagctcactgcaacctccacctccccggttcaagtgattctcctgcctcagcctcctgagtagctgggattacaggcacccaccactacgcccggctaattttttgtatttttagtagagagtaggtttcaccatattggccaggctggtctcgaactcctgacctctcgaccttcccaccttggcctcccaaagtgctgggattacaggtgtgagccatcacacccggtcaatatcccctccttttcttttttgaggacttccctccagcagtcttgcccccgcctcctggccccctgcattgccatctctctctctctctctgtcagggatcaggccacacagaggggctgtcatctccctctcctgaccccatgtcctcctgcacctcagcctcctatctctccctgaccaccatcgtttacccatacttcccacccagacctctcccctccagtctctgaatcagccaggtcacggtcctgggaaccaccctgccatctgtcctcactgctctggacctaagcagagtgcccacacagctgcccactggcccaaaatgctgtccttgcagcctcctggttttcctccccctccctggcccctattctccatgatgccccctcctccatcctccctcccactgaccttctccttctgatcccctatccccctggcttcccccccacatccttcctccacctggcgtcccctccccctgcttccctctctccctggtcctccctctccttgccctctccctagtcccccttctccctcagctgcccctccctggtgccccctctgcctgatccttcctatccccccatctccctgatcctcctccttcctaatcctccctctcccgatcctccctctccctggtccctttattccggactcagggctgatggctccagggctctgtcctcgcccctcttttcttcccacactcttttctcagtgagctcatccaatcccaaatttaaatcccagccctgacgtctctgtcctgattcaggctggagcctccagttgcttcctggaccctcatgcttcgtgtggacaaagcggaacctctgccaaagcctcctctcccctggctattccccctcgaaagtggagactctgtttgccaagttaaacaggccagaagccctggagtccccctcaactgtcctctctttcacccctcacatcccatccatcagtaaatcacattaaacggggcgtggtggctcctgtctgtattcccagctacttgagtggcagaggtgggaggatcgcttaagcccaggagttccaggccggcttgggcaacatagtgagaccccatgactattatttaaaaagagactggccgggcgaggtggctcatgcctgtagtcccagcactttgggagggcgaagcgggaggatcctgacctatgaggtcaggagtttgagaccagcctggccaacatggtaaaaccccgtttctactaaaactacaaaaactagctaggtacagtggcatgtgcctgtaattccagctacgtgagaggctgaggtggaagaattgcttgaacccagtgggcggaggttgcagtgagccgagatcgcaccactgcactcaaggctggacaacagagtgagactctgtctccaaaaaaaaaaaaaaaaaaaaaaagactaaatgaggtcctgtttctcctctcaaacccctccatgagagaagagggaggttgcgtacatggacgtggacaccacagaggagggggcttgtccagaaggggagtcaaagaaggttctgggaaagaggcgcagagcggctcaaggctccgtgaggaagggagaccatgtcagcagtggagaccctgggggcgagtgagcagagactgggagctagagaaagccaaatctgtgacgaagaacatgccaggtaagaccaggcaagtgtgttggcgccaggtcgtggggccctcgatggctaaggagctgggactgtctttgggaggtgacctggagccactggagatcctggaacaggagcagtggtggccacagagctggcggcctgtgcaggatggactggggaaggcagggaggccaccccgtgcttaggcctgaagcaaccagggcagtggaaggaacaaataaagacgggcggacaggctggtaggactgcaactggttgctgtggggtgggggca[131 bp omitted]caaaaacccatctctacaaaaaaacacaaaaatgagccgggcatggtgccacgtgcctatagtcccagctacttgggagactgaggtgggaggattgcttgagcccaggaagtggaggttacagtgagccgagatttcgccactttgctccagcctgggagacagagtgagacccgggggatgatgtctccgttcttcccccaggaaatagtgaaatgggaccttggtactggtgcggtagtagggggcagtttctggaccacatggccagggctgatcagaccccaggtgggccccaggcaggcttacagggtggcctccaatgagagctttgtccaccccagccgctgagaaaggctggatccaacagtgtttctacagcgtttttttcacagaggagattgagagctggtcactccgtgatggaaggaagggaaagtggagaagcccgcccaacatgagtggtgtcccagggacttaaggctgcagtgggggtgcgcaaaagacaatgggggccctgataattatcagagggtcaggagatggttgggccgggagctgccttcccctagtctgctgttcagttcccaggctcctgggcagctgcgccggtctctccttctagcaaggctgggtcatgtggctttccctgatccccagagactggactcccttatttccaagtatgtctttactgtgcactccccacactcactttgttttttgtttttttgtttgtttgttttttgagacagtctcactctgtcgcccaagttggagtgccctggtgccatctcggctcactgcaacctctgtctcctgggttcaagtgattctcgtgcctcagcctcctgagtagctggaattacaggcgctcaccaccacgcctggctaatttttttgtatttttagtagagacgggtttcaccatattggccaggctggtctcgaactcctgacctcgggtttcacaatgttggtcaggctggtatcaaactgctgacctcaggtgatcctcccgcctcggcctcccaaagtgttggaattacaggcgtgagctgccgtgcccagcctccccaccctcactctgggagcccaaataggcctttgctccttgccaccaaaagctcctgccccagtgtcttcagccctaagggccaagtccaaactcatactctgctgcaatcaattcttttaccaaaggcatccaatgagcaactatgaaacctgctgccctgtgggtgggtgggggcgactctctggaggtcaagaggagtgtgtgctgggcacggtggctcatgtctataatatcagcactttgggaggctgaggagggaggatcggttgaacccaggagtttgaggttgcagtgagctgtgatcgcgacactgcactccagcctgggcaacagagccagacagtgtctcaaataaataaataaataagatttaaaaatgagtgttctttggctgaggtcccatgaacgtgctacagtaagacactacaataagacagaacctggaatagggtgcagcgagtgaggtgctggcctggggcccaaaatttaaggggcctagtaatcaagagaaataatattgaaatacaatacttaaaaaaatcaatgttaaaacaaaaatatcaatgatgaagagaaattgattttacttttttgtttttgagatggagtctcgctccgtcgcccaggctggagtgcagtgtcatgatctcagctcactgcaacctccccctcccgggttcaagcgattctcctgcctcagcctccccagtagctgggactacaggcttgtgccaccacgcctggcaaatttttgtatttttagtcgagacagggtttcgccgtgttagccaggatggtcttgatctcctgacctcatgattttcctgcctaggcctcccaaagtgctgggattacaggggcgagccactgcgcccggcccagataaaatcattttactttattttatgttttgagatggggtcttgttctattgcccaggctagagtgcagtagcac[134 bp omitted]tatgggggtgacattttcctgagtgtgtacaaggctgcacagagaatcccccacttccttctcctgcaaataaactgggaagggattcctccagcttcctcggtctcaggctgcagcgcggctgcagctcccgaaagtgagggagcaagtggtcaccccaggagggtaatgggatccgcggcgcaggaggcggctcccgggtgaggatccctccgcggccagcaggggacgctgtggggctgcgccgccaggaccgttttgccagggaagaagccatcgcgcacctgggttcgtgacacccgcgtcgctcacagccccagctcgcccggggagctgacccacttgctcagctcctgggcgagatagctaactctgggtgtagagaacaaaaccaaagccgagacgttgctccttacccactagtcccctgcacccaggcatagcccacccagaataccacaccttcccccagcaaggcctctggggtatcctgtttgtcccaggtccaagtagcatccccagcccgggtctggctgattcgctaattgccagtgtcctctctattgggaatggagagcaggaagaaccttccagaagggccacattctcgaaggattccagttttgatgagttcagaagccccttcaccattctcaagccaagtggtatgaaatgaggaggggggcctttcttccctgatcgtctccctcacccccgacctcagatgccccttttcctctgatagtccctacggcccatggctctgtgatccccattggctccggttccagctctggcttgcctgggcccaccaggggccctgggcccaggacttagaagctctcctgggttccttctatttcttttcttttctttctttctttcttttttttgtttttgagacagagtcttgctcttgttgcccaggctggagtgcaatggcacaatctcggctcactgcaacctccgcctcctgagttcaagtgattctcctgcctcagcctcccaagtagctgggattacaggcgcctgccaccacgcccggctaatttttgtatttttagtagagacggggtttcgccatgttggccaggctggtctcgaactcgtgacttcgtgatcctcctgcctcagcctcccaaagtgctgagattacaggcgtgagccactatgcccagcctcttttcttttcctttttcttttctttcttttctttttttttttttttttttttgagacggagtctcattctgtcgcccaggctggagtgcaatggcgtgatctcggctcgctgcaacctccgcctcctgagttcaagtgattctcctccctcagcctcctgagtagctgggattacaggcgcccgccatcacacctggctaatttttgtatttttagtagagacagggtttcagtagagacacggtttcaccatgttggcaaggctggtctggaactcctgacctcaagtgatccacctgcctcggcttcccaaagtgctggtattacaggcatgagccaccgcgcccagctggttccttctatttcttttgctttgccttccgacgtggccctgatggcctgacagtcactgtcccctgcactgtggcgtccatcctcctcctcctcgtacctgccttgcaaggcaggcttcatgttcactcctgcagtgaacatgaggcaggaagagaccgcataagttagaggtgactgtggctcagaaaggctgcgtgacttgcccaaggtcacatagcagtgagagatggagtgtgggcccagagccagcacgctgtcttttggcattgcctccctggaaaggcggggcccgcactgtcctctctgccctgcactgttttagttcacacagctcactcttggcccgtgccgggtatttgtcttgctttctaagagtgtttatttattgattctttggatttctacttagttcctcccctgtgccaggcccaggagacaaaggcggaggctgcactcaaggagttcatggtctgggagacaagactcttcctgcgtgtcagctgagtcttcccaggcagcccgcaggactcccaaggggcagaggctgtttcctgcttctcctgcagcccacccggggctggtgacctcctggtcccttctcagggagctgctgctgctgccgcctccatcgtcgggtgggggctgggcaggcctgacccagcagactatggggtgaaggatagagggctgaggaaggggtctgggagctgagagctcagggaaggtgttgggggtttaaagctgatgaaagcagtcttcctttctcaaacacccaagggctgatccaccgcatgtaacttgagcagcagggccgggccctcagctttgcctgtgcgcagcctccggtgttcaggtgtagaaggtcaaggttcaggccaggcacggtggctcacgcctataatcccagcactttgggaggccgaggtgggcggatcacctgaagtcaggagatcaagaccatcgtggccaacatgctgaaaccccgtctctgctaaaaaatacaaaaattagccgggcgtggtggcacatgcttgtaatcccagctacttgggaggctgaggcaagagaatcgcttgaacccaggaggcagaggttgcggtgagctgagattgtgccattgcactccagcctgagcaacaacagcaaaactccgtctcaaaaataaataaataaataaataaaagaaggtcaaggttcaaggttcaatccttggatctatcactaaagcactgggacaaacagggcccttctgccttctgtctggatatctcgcctctgattccttcatctctattgtacccttgctgggaggcgatttccagaaccaaatcttaaaaacctcctgactttttttttttttttaagacggagtctcgctctgtcccccaggctggagtgcagtggccagatctcggctcactgcaagctccgcctcccgggttcacgccattctcctgcctc[134 bp omitted]agcctcccaaagtgctgggattacaggtgtcagccaccacacccggccttgttttttttttttttttttgagactgagtgttgctctgttgcccaggctggagtgcagtggcccgatctcagctcactgcaacctcctcctcctgggttcaagcgattctcctgcctcagcctcttgagtagcgggactacaggcacgcgccaccacgcctggctaatttttgtatttttagtagcgatgcggtttca[131 bp omitted]ctcccccaacccccacaaaaccccagttccagtttccagccctgcgttcctgatgaaccaggtgaggaacccacagcaatcttaatccccaatttagagagaagcccagggggagccaaaggtgagacacaggggatggggcgcccttggtgtgggacaggggatggggcacccttggtgtgggacaggggatggggcgcccttggtgtgggagaggggatggggcgcccttggtgtgggacaggggatggggcgcccttggtgtgggagaggggatgggccgcccttggtgtgggacaggggatggggcgcccttggtgtgggacaggggatggggcgcccttggtgtgggagaggggatggggcgcccttggtgtgggagaggggatggggtgcccttggtagtgggacaggggatggggcgcccttgttgtgggacaggggatggggcgcccttggtgtgggagaggggatggggtgcccttggtagtgggacaggggatggggtgcccttggtagtgggacaggggatggggcgcccttggtgtgggagaggggatggggtgcccttggtagtgggacaggggatggggcgcccttggtagtgggacaggggatggggcgcccttggtgtgggagaggggatggggcgcccttggtgtgggacagtggatggggcgcccttggtgtgggaggtcaggggaggactttcaggaaaaaggcctgcgtccagaaccggggatgggggacagaggtgagggaaggtggcaggaagagactgcacgagtgtgcacaggtacagcaagaacgggtctgtttaatgacacagctgggtctggttacaaacatcagaaactagaaaaggaggacgggcggttgcacagatgaggatgaggatgaagatgaggatgaggatgggccaggaggggacacagcaggagccacagcagcaaaacatccttgaagacgacacacgtgaccaaggggcacacacggggggcccccctggcaagcctgacgcagatgaatagacagggccgactgccggccaggaggagggtggggtggggaaagccctcggccctcggagctgagggtgagacccaggcatgtggtcccgccgacctgctgcccagcagcccggatcccccggggctgccctggtggccaaggcaggtggagctagcggtcgaggtttctggactgaggcccctcccccagtgcggtcatcccacccagaacttcgctctgcccctgcccattctaggacagccggtgagtcagttcctctgagggagtagggggagcccactcctttctgcctggaagtggaattcaggaatgtggggagctggtctgagaaggggctgggctttgccgccaagccgggttgccccagccctgcccctccaggcccaggtcctctgcgctgctgtgggatttcctctttgccagaacactctgttctctgcacaaccggaacccctccctgccccactcacaggtgggccaaaccgaggcttctgggcgccgcggatacacattctagatatgtatgtgtgtatatatatatgtatatatatatttatatatagctcgtatatagaatatatctgtatatatggtagatgtgtgcgtgatactctagatggtgatgtggagacctgcatgctggccgggctgatagaaacggggctggtttattccctaagggactcctagacctgtcccgcttcctgccagccgctcagctaggtctctctctaacagtgagtagaaaagctaagaagagtgggccccgctctgcccgccgcgctggggtcagcatccaggcagccagcgccgcctcccagcagctccagggggggaccctggccgccacagaggcctccttcggggaagttgagtcagggattcctccagcttccttggcacccagaaatggagcgtcaaggagggtcttcagaactcggccttctgctcgaggtgctgccagggaggggggtggagttaggggtcctacggccccgaagagggcagtgtggccggtgggctgtggacgagataggaagggaaggacaaacgttaccagaggcagggaaggaccctcgggggaaagggggaggacctggggctggcgaggctcacttcctgccaagagatccggcacagtgcagttgaaagcaaccgtgagacccaagttctagtctccgtcctgctacgaacgtgctgtgtgatctcaggcaagtctactggcccatgggagctccggatctttttctctaaaatgtgaataatgtctgtcttgtgacataaactgggtaaaaaagtgtttcacaaactgcaaagcacgataccaatgtgagctctttttccattaattctgaaacgtggcgcattctgtccggcctgtctcgtccctcctcgggccacccatctgtattctcgtattctcggtacacacagcgccccctgcagtcattgcgccccccccccaccccccacccacgcaaaggcgcacaccctggagcagagacggctcaataaacagtggcgcctggcccacccctgcttccctgataagagaagttgggcgagggccttctaggactctactctgtaactccatcctaccctcgagcccatggggaccctggcagcagggaggctctgcaggctcaggccagggacactaggggtgggctagagggtgtaaagggatgaggggaccaccccaccacttgacagctgggagtaacccccatggggtgccagtttccacggtagcccatctccattcagtccacaaggagcagaagtgggcggaggaggagacttcggccgtttcaaaatgtttggggtttggagagatcttagtccctagggcagggtggggagggcaggacgggcagcgtgctggggaacttgggccatgtgtttctgattcactggggctcgcgcccagccagctctctttccagtctctcttggcccttgtaaaaaagcccttttctctggaagcaggaagtcttgtgtcctggctgtaaacaaactcatctttggcagcagagcctgcgtggggagaggggtgggagggcaggcaagccccctcccctcctcttcccctgtcttttccctggaccctctgggtgacagctggtggggggtgagggggcaaccactgctctccacgccctgccagtgccctcctctggtgggccaacatctgcttgtttcccattgactcccaggtctcaggcaggccagggcccagctgtgcacatctggagttggcttggctccagccagcagttcccgaggactccactctcttggggtggtgctgacgggagaggggggaggggagcaggagccagcccggggccagtgtggtcagcagcaggaagggcaggaggcctggcgtccccagctgccctcaggggacctcctccaggagctgtgcctgtgaacagaagggccggcagtcttgggggcccgtgcagagcccggcgggagacgccgccttttccatgggaaactgctgggaatgtttctctaccacgggaatgtttctctaccacgcgtgtcccgggctgctggctgacctctgcttcccattcccgcctccgctcctctcctccttcctactccagccctgcctccgcctctccattcagctcccagagtcagcctccccttgggggcccagggaggccgagtgttcccaaccgccacatctgggggctagccctcccctcacgctccgagtcagcaggagtcacagagggcggccaccctccttgagccacctcctgggcccagaactggaagcccagcctccaggtcagcctggaagtaaacatgcccctgctcgtgtgcgtgtgagcgacacccatgtagcttcctcgtgggctggggtgtgtgtgtgtgtgtatgtgtcctcgtgatcctccgggctctagccctattgaggcagagggcatttagcagcactggtcggcatgagatgaaaaaacagccccttgtgattggcacccagggaggaagtggctgggctgacctgggctgcctccgagcctgatgatcggaccttaccgccaggagcctctggcgcctctctgcctgggcagctgtggctttgggtgctctgagctctccctggctctagggaaggggaaggctctttgggaggatttttgctcagggctcatggctctgagcagcctgaagtcacaggggagccatcttgaaggcctttcctattatgcctgttcttacatgtcagaccccagggttggcctgcctcaagtgtgcctgcccaggtgatcagccccagggcctcaggagatatgggagacctcggggacagcagaggacatggcggggaggctgcccagcccaccctcgcccgcctcctcacgtggtggcgttggggacctgctgcacccagcccacttccttgtaggcagcggtcacgtggctgtagatgaggccacgcagcttggcccaggctctctgcgtctcaggtgggaagtcactggcaaattcctcggcgaccacctccagaatgaccccagagaggatctgggggcaaagggaggaagggggagtgaacgcccgggcgccctgcgtcctgcaacccccaggcccctccgccccacgtgtggccgagaggatcattcctaacgcaacagtctggcagctttgggaaccccgtgctctcaggacaagggttgccctggacccagcccctccatcctgctgccgggcactgcccctccctctcgcagccactccggggatcacctctgttgctccagagagccgtcgcagagcctgcgagctgcagatggccatgacgcgtgggcggtgggggctctgcagcagatgggggcgcataccttgaagtacaccggttccaccttgtgcttgagggcgtgggctttccccacaagggcgagcacagaggacaccttgtcggggtcatgcaggttctccacgacagtgttgagggcccccatgactcggcaggcgtgcttccgcagctgggggctccgctccatctccaggggatcctccatgtgcttgaactggctgaagtactgcttggccgaggggaagttcacaaagaacctggcaagaggaacaggggtggtcgctgaagctggaggctgcctcgggcccaccctgaagcttccaggatagtgggggctgaagaagtggaccgcagtgctccccacccccgcaccgtcactgttttcactaccatcagtagacctcagcatagaccctcctccctctggccaagccggctcacccctaccaagtctggccatgtctatctgccaggcttgctcaggctggcggcttcatctcctaggcctctgtcttcctcgcttcttgcttccttcccaaactctacacccccttcaagccctgctctagtcatagccgagagggtaagaactcaggttctggaatcatgagttgatctgaaattaaatcctctctagttggactgaaattgttctgactctcccaaaatactgctttcatgaagtcatgcttatgctcaaaaacattcaatggctccctattgtctgccaaagtgaaactccttaaccgggcattccagacttctgaactgtcccccacccgcttcttcaaactcatgtccacattccccactatactcgcatcatccctgtcctggctcagcggctttacttacagttgggaaaatgttcctcgggtgagccacattcctttctactacccttttcctgtgtcagacatgccttacctggagcaggctggcccaggggaaatgctttgcccctgaggccattggcactactcaggtgaccttccctgccctccttccagcgtgtcagactggatcccaaggctctcacgcaccctctgaccccctgccctagctggggccctgcagtgtgaaaaatgacaatggctttttttttttttttttttgagatggagtctcactctgtcatccaggctggagtgtggtggtgcaatcttggctcgctgcaacctctgcctcctgggttcaagtgattctcttgcctcagcttcctgagtagctgggactacaggcatccatcaccacgcccggctagctaattttttgtatttttagtagagacagggtttcaccatgttggccaggctggtctcaaattcctgacctcaggcgatccgcctgcctcagcctcccaaagtgctgggattacaggtgtgagccaccacgcccggccgacaatgactttttcacctcccctccctgtcggggctggatgtcatgtgagacatgggcaccgactcaatcagaacttaaataacttaagtgaatccccagaaaatgtatggagtggcctggacctgttcttccaggttgttctgccccttcgtgtgtcccctttgcgatcagagagagctgataatttgcggaagtagccctttggccaggagtcgagtctcagatgtgagggctggaacagatgcggagagggcatctggccgggtcatccctgctgctggtggaactgctattggcggggaagtttgcacagtgaccagggcacagtctgtgtggagactcaggagggcccctctcagaggccaactgtgaccttgggcaaaccgcttcacaagctccctgtttgcagaagggcaagaggagggcccccgctcactgcttcatggatacacgggtgaggacacgtgaggcgacgggtctgaaaatacattgaattttctggagaagcactgtaatgagggacaaatgtgaaaaacccaatttggacttaaacaagcatctcagactttggaggttttacaattgcaataaaaaataatgatatggccgggcacggtggctcacgcctataatcctagcactttacgaggccgaggcgggtggattgcttgagctcaggcatttgagaccagcctgggcaatgtggcaaaccctgtctctacaaaatacaaaaaattagccaggtgtggtggcacacacctttgattccagctactcaggggcctaaagtgggaggatcacttgaacccgggaggccaaggctgcagggagccaagattgtgccattgcactccagcctgggtgacagagtgagaccctgaatccaaagaaataatgataataataataataaaaggtcaggtgtggtggctcatgcctgtagaactttgggaggccaaggcaggaagatcacttgaggccaggagtttgagaccagcctgggcaacatagtgagatcctgtctccagaaaaaaagaaaaaaattggctgggtgtggtggtgcccgtctgtagtcctagctacttgggaggctgcagcaggaagatccgatcgcatcacgagcccaggattggaggctgccatgagccatgatggcgccaccgtactccagcttgggtgacagagcaagaccctgacaaaataataacaatgatatatatatttgcctgctgtgttacaatgttattgtaccttttttctttttctttctttcttctttctttctttctttctctctctctttctctttctctctctctctctctctctctctctctctttctttctttctttcttgagacagaatcttactctgttgcccaggctgcagtgcactggtgcaatcttggctcactgcaacctctgcctcctgggttcaagggattctcctgtctcagcctcacaaagttagctgggattacaggtgcccgccaccacacccggctaatttttgtgtttttagtagagacggggtttcgccatgctggccaggctggtgtcgaactcctgacctccggtgatctgcctgcctcggcctcacaaagtgctgggattacaggtgtgagccacggtgcccggcctgttattgtatttaattgccacagctaagcgggtattacctctattttactgatgaggaaacaacagggaacatttattgagcacttactgtacgatctcacgaatccttgcaattctctcctgaggtaggcactgttttaatccccatcctatgaattaggaattgatgtccaagattgcccaacaaagtagatggcagtgccaggaaggggcccaggcaggcccgctttgacagtttccctacactgcctggagagacagctgtgccaggggatcgtggcctggtaaccaggtgtctcctgcctcaacacccaccaccgggttgtggccctgaggaatgacagtctcagggagtccccacccagaccctccacggttctgtggcccctggggcccatgtgcctggctccttcctcctggctctgcggtgtttccacctgagaccctcccggtctcagcctgtgctgccagggaggagcctccacagccagccctggggagtttctcagctcccagaggcatctgggcttccaagagagcctgaaataggcctgtctgagtgtgaggaggaaggtgtcagagttacaaccagcagggagggtgggtgttccctcttggtctcctccctggcagggaatggaagtgtggggtctgcctcaggctctaaagcaacgcctcctccacccccaccaatgtggcaacttctccaggttgggggtgtggaagtgcagctgcctccttcctgccctgcaggctcataagggctgagggtgctggcctggcgcagtggggagggcagaggtgagagtgctggccagagggctgcagctggggtcttgaccttgaggatgtgtatgttgtgtgtgggaagacagggtgctgtgtcaagactgacgggcccaggatctgagaagggaccttcaggagcccttatccccctttcttccccttcccccactgaccaggccctggacagagacaggaggagagaaaaaggaaagcaaggccctgtggggcttgggctggcagggagtggctgagacaaagctgggccaggctgtcctggggctgggctctagtccacaaagaagtggagtcagagtggtgaggggttactctgggcactgagtgcattggtaatgacctcccccagcccaggcccaggcccctctaagagacaggagtggggaactggaagaggggtgtagagagagaaagaaatccttgctgaaaactcggactgcccagacatggccctggcctcggtgtttcgtttctcccttggcatctgccctaccctggtccccttcctggggaggttcaatggtgttccatgatgtggacggtgagcacttcctccacgtatccgcacaggtacctggcaggggttgggacacaaaacctccaaggtcctgaggaccctgcctcgcttcttcatggtgacccatgagtgtgccagacgcatgcaaggccggtgggctgcaggtgctgacacacggctgacggcaccctccgaggacgcagtctggcacatctgcggctctgctacccacaatgtgcttgtgtgggtgccagcacctgtggggattggtggttccgagcgtctgaggccctagtatcccaatgtccctcttagcttcctgccactcccgactgtgtttctgggcttgggggctgctgagatagctgccccatcctcaggagcgctcctctaactccttagaagtgcttcctgctctttttcctccaaaatctgcttctgagttggaatcagggcatatcatggtggagctgggtcggtcccaggcttgggagaggccacagggagaagaagctggagatggagcaggcctggtagtcaaggatgcactaaagctgcccttccagagcgaggcttcaccccatctgcacatgacaaggctgccctgctctgtcctagatttgaccgctttcctctgccaagaagaggggcttgagggtgagcatggtctggggctcctctgcctgcacccccagggaccagcacgtgtggaaagagagcatggatttgtagctagagtcagtgactagctttcgagacttggacacatcacctctataaggatggtgtgtgtgctctaagcctaggtgtgtgaagaacggggcgctctgtgtttgtgggtctcttgggggcatgtagtgcctgaatgacccctaagcccaagccactgcatttcctccctaggtgggaggttttagggttaggccctgtctcctgaagcttctctcttcttcccctcaccctccaaactcagcagggattgtatcctaggggactgtttgcttctccactcacctgtgcctgccctgggcgctcctgctggcccgtgccctccagcgggaagggggcagctgggaacactggaccccccgggctctcctctttctcaacctctgctctttgctctctgttcttccaagaggctttgaatcccgcaagccgctgagctggagacagggttctgctcctctttgtcccgcttcttggctgagcctcggttttcccatctctaaaatggggagcccctgctatactacctttgaaaggccagaaaaatgtgtgtgtctgacagtttggctgggtgtctggggtggctggccgagcaaggagttctgaggccggggagaggagggggaccgaggtgctctcctgcatctggttcctagatcctggtgaacaccgcgccggagccagggaaggctcaacccaggcttcgttcaccccaaggcgccccacgccgcctgctccgccgacctcggaccggccccattcgcggctggggaggtggcgctggagctcggacccgggcccagccctcctctgcccggagccgctgccgccctccctgcccagggcccggccgggccgggcgacacctacctcaccaggatggccacccccacgtcctcgcagttggcatagagccgggcccacatagcctgcaccgccttcctctccgcctcggacagctcctcgctccgctccctgcgctcgatctccatctcgcctggcactttctccatgagcagctccaagcccagcccggctttgctcggcggcggcggtggcggggcgcggggcgcggggcgcggggcgccgggagccggggccggctgcgtgcgcggcgggcgggcgaggggtagagcgcggagggagggagcgtgtgtctgtgcgcgccgggtgtgtgtgtgtgtgtgcgtgcgtgtgtgcagggtatatgtgcggggggcgggggacagccagcggtggggcggggatgtggtctgctggaaaatgtttaaaaaaacaaatccgctccaaacccccagccccgtgtgggtaagagccaatgccggcaaggtgaaggctgcgcggggtgggggcgacgcgactgccgcccgcccacccgcaggccacggcggagttgcaccgcggggcggggctcgggtaggtgtggccggggcgctgggggtcccgggaggaatgggcggtcacgcggcgctgggcggcgcgggccgcacaggagtgcgctggggcgggcgcgggccgggagcgctgggttccgggtcccagtgcttgcggcgtcgcgagtgtgcgcgtgcggacccttcccgcggcggggaactgactcaaagtccaacactcccgagctttcgcggcgaggccgaccgccagcccgcccgtgggggcgaacaggagcccctccggcggccgccgtggacctagctgggctcccctcgcccgggcctctccccgcgcccccgagccagccgctgggggccgcggcgccactcccacggctctggacgcccaggctctggggggttagcacgggggtcgtccccctgcccgcccaccgccccggctgtcggaacttgagcgcacctccgacctcgggcgccagaggcctgcgccccctctccttccgcccagcacctccatgccctcggtgcacgaacgcggcggcggcggccagaagtcccccgtggcttatgaatgacacggacaggcaagaaccagccgctgccctgaattctagcccagctggtggcggaggaagtccagagaggcaccggatagggcagacaggacctggcagacaaaaagtcttgaggaaggcgcaggctgctggggacatctcagccgccaccaagggcccgattccgggcctgggggaggcaaatccttcctcctggtgggccctatccagggcagtgtgagattgggccagaggtggggggagaatcccatggtgcctgccctgcagcggctgctcagtcctggggacagcctgaggccagacagggcctggcagtgttgggaagagatgtcactcaggctcccggcgacccctgtcctcgctcaagacttgatgtcccattgcccaagcattgctaagggttggctctgcgctttcactatggttcatgtatttattcttaaaatccgactttaaggtccgggggaggcgaggagaactcaccctggccagcctcagctgcagcctgggcccctcctgggagctcagggttcaggtgcctgggggaccctgaggcagtgcctctgacactgtctcccccttgttgagggaatgaaaatctaatgcctcctgggggtcttggaggggctggaggggagcgggtgggttcaggttctcacaccactcccagacccatgtctcagcgtggccatggctggctccatgctccacacacacactgaacagcttctcaaagttggtgtgaccaagtggctgcccaacaggtccccttgggatgtggaaagaaaataggagaaatcgtgtaactatttcttttcatctcatcctttgcaaatgtaatatagtcgtatggtgtaggaatgaatctgtacagtagtctagcatataatttgtaagtggctgcacctgtctattttgtgagtgcacacttgaattctgccttttactgaagagggcgtgtaatcagaaaagtttggagaggattgtccagagggtaaaactgccagcccttcactgttgagtctcccgtctctctggcttcattatccaatattcctcccctttcttcctcctctcctgatgcttccacggtgacatcattgcttcacctccattcaccttgcagttactggcagatgctccatgctttcatgtcagtagcttcggcagcgtcttctgtctgagggctcatcctgccttgtgcactgcaaattcagaggcccttgctcctctttaaacgttgccctgatgcctgcaactctgaaagtgccctgtaggcgccttgaataactcctgggtcactctactgcagtcattgtacttgacagcacatttgtttagagtggcagctccttgcaagcaaggcccagtctcatcagatcgagactccgaatacgtgctcaatgccacagtgcatgccttgaccctaccgctggaggggagaacctgggcccagtgagcttaatcagtcctcacaaggtcggggccgctgacccactaatcagcttgagcctcctaatccatccccagcaggaaccgcaggacagacggcagtggctcctgagagctggctggggccattttggcccctcgcctgtggccttctgcagacttggcctgggaggggatggggcagctgcgccatgtgcaccacccttttcctgctcagcaccctggccatgctctggcgccgccgatttgccaaccgagtccaaccgtgagaaactgaccgggctatggctggcggttggtcggggggggggggcatggggctgggctgccaccaagctgaaggtgggcaggggctgcgtgaaccttcagcggggctgggagggcattttgaggaacccttgagagagcacagtctcagagcagggggacttagagcttcaaaggctctagttgcagcctctactcccatagcccaatgcggcctggacctgtggagggacagtgaggggctgggcacagccatagctcttcctccctactcttgcctcccacagagagcccagcgacgtggatggggcagctaggggcagcagcttggatgcggaccctcagtcctcaggcaggtaaggcaggagtctgggctgggggagggagggtgctgccaaggaagctgtggctgtgcatgcctgggggtgcacgtgtgtgcctgtgcgcgcctgtgcgtgcaccgtatcctggcccttgccctaagcaccctgctccctgtccgcctgctgggcaggctggatgtctgttttctgcggttgggaatgggaaccctcagctcgctcctctggaccaaagccgctgtgcctctcatctccagcacggggcggtcccccggggcaccttctgtcagaaggcacaggggagtggaaggagggatgaggcaggagtagctctgtgtggctttgctcgcctttccttgcccttccccctcctcctcctctgcccccgccctgcctcagctaggctgcctgagcctccagcaggattcgctgtccagtccccaatagaaggcgcgggaggagcatgacatcatcagcatagagtgccattggctgggcagaccctgcgggcaggacgctgtctccagtggccagaaagttaactcttccctaggctggagccatgtggtctttagggggtgaagttgggggaacttccagacttttccttccctgggtgaccagtgtcgttcgatgataggggcgcctatcccaaccaaacactggaaaaaatcagcaaatctttatgaagttcccatgcatgaggggttccttctgtgcctatggactcacctagcgtgggagacctgtctgaagagtgacttttttgctcccagtgaaacaaagagtaaaaaagatccgatgacatctttgggtcagggcgcactggcaggagggtgtctccacacagggaagactcaggtggcgggtactgtgaccatccatgtctctttctgagtggggacctgccagcaatgtgtcccttagatatgcggaaactggcaaccgagagaacttccgtctttctgtctcctgtcgtctgagtcctgggattctgagtcctgagattctgatgatcagaaggcccaatgggaagccctgggcctgtacaggaagcggaggcatttctgcgacacctcaactcgataggccagctggcatcatcataatagtgcctaattgatatcactagttaaatcagctacaatgaccacccctgggcctcccccgataggaggccctcaaatgctgggtggtccacgctattgagcccgggtctagagttgggcagggagaatttaaattctggcttccctcttactaatggaaagactatgggggaaatttatgcaatcagtttatttatatgtaaactaggattaataacagtggttgtgaggttttggtgagggtgcagagtgattgctccataaatgctagcagctgtcttgtttcatgctcgggacctgtgctttagttttctccagaggtttcctacctattaagtcactcgggaggctcagtaaccccagaggattggcaggacatgtgtttttaatctttggttaatggttgtggaaactgagggacagggagatttaggtggcttgctccagatcatctatctcatttgtggctaatgcgggatgctcaggcccgattccaggcagggtctcttctacatgaaatgggcctggacctcctggcaggagagaaaaggccaaatctgaggaccatctggccaggcctggcctggcgtgacttagccagaaggaagcagttgcctattaactccttgggacccagttaactggaaaaattggtctgacatcgaggaaccacctgccgatggtggctgccgtggaaggctggcagtgggggtgacatttctactctccagtcacactgtcctaaatgccaactgattccttaggtggtcctgcccctcaatattggggtgaattgatagggatgggaggaggaggaagaggagagtcagaaacatgggaaggtcgtgcccttcaatcctgaccccagtgctttcctctgtttagggagaaagaacctctgaagtaagccctcacctctgcaggtggggctcaggcccagagactgggatcagctggctcaggcaggtagggcagggctgggagccggggagggcagagggcaaggcttgggacaggcaggaagcaacaggcaagtcccggccatgtgggaggatagcaggcagtgttcagctcttgccactgatggaggttcaaagtaggcggatggactcatgcctttggctgctaccttgagcctgttgtggtccgggccatggggcaaggatgagtttgaagagaaccaggtgtagtttgaccacattttctaggcttggggatggcgaggtggtcgtgctggggcatgagggcagtgtcggaggacgcccaagggagaggcggtgctcggaaacatccactctgaaatgcgagtcccatccccaggtgtgggagaagtgctgatctgctctggttttctgtttcagctcaggtcctggttcgtcccctagcccaggaggatgctgtgggagctgcagcagcggcaagagggagaatggggggaagcagcactagagaaggtagacgcctccctctcagcccgggacctgccagtctccccttcccccaggccctgggtgtgggctcctgagcaggacctggctgggcctggcagaaagagcagacgtgctcgctgctctcggacgggcttccttccctctgagttcctgaggctcctctgagggactgctgagcctgagaaagcctaggatgagggacttgctgggtccaccaggctaattctggggcagccagcagcccaggcaagaggcaggaataagtaaggagtgaggagaccccagaagcaagggacggctgatagctcacatttactaagcaagggcttccattcattctgtaatttaatcttcagtcacccacagagcctggtaatgttattatccacaatttctaaatggggaaacacagagacaggttaaataatttgcccaacatcacctagctaggaagtggaggctcccaggctcacactggagctgcagagcccacgctcctacccaccatggcaggcggcctccccctggaacctaacagtttgcaggggttgggggtggtttgctggcctggccaactgcctgtcagcccaggagctattctgttaagccgccacttgtggtccgaggtgctggtgtcggtttgccacagtggcactcgcttttgtgtcatttgcctttccccagttcccagagctcatcctgtcactggctgctctgctgaaattatcaataagaaatgccagttggatctgtgacatgtctgcctgcagctggatgggagcaacggacagcttgtcctccgaatgtgttttctgtatgtgtgcaagcgcgtgtgttccaaacgggcagtagcgtgtgggaaggaaaaagcctgacacttgtttttatcaatttgctgatgctcagtcccggcggctgcctcctttgcccccagctgctctgccatttctctcttttcaatcctgcatgatcctgagcagagataaaagcagatttccgcttctgctcccagatccaggagcagaccctgcaggcagctgctcctgatgtctcacagctattagtcttcaaaaaccccccgtgcctctgtgcacacgcgtctctcctccccagccagcccccctcccagcccagcggcgatgtctctgcctggctggcccgtgcccttgacttccaggcagtagaagatggagttctctagacagcagcacttcagccgccactctgcctctgaagggaaggaagggaaagggtgagggatgccgcagagcagagggaaccgctggggaggcgctcagggtgggggaggaggtgcaccccgctggggagggcctgctggtacctcggggagcctggctggggtgtgtgcgaaggcagttctgtgggagcctctcaaagtagggcaggcaggaggcagggggaaagtcacactagggaaggagcctgcagaggcaaagccagagcgccagcctgacccaggccgtgagcccgtgatcgcctgtctcagctcctgtcagcctgtctctctctttggaggcatcggccttcctggtgacaggcctgtcaggctgagggccagagggcactgttcccgggacccagtctgtgttccccgatcctatctgcatttattctctatttgccatgttcctgtcacctcatccttgctgccatttccgagttgctcatctccttccactggtctgaggaattgtcaggccaaggtcatggagctggctcacggcccagacgcacttccccagggcagcgcccctccacgccactgttccgagaacctgcgcaggaggtggtggctgctccagggatccatccagaggaagggcgggaaaaagagaggaaggggctgctggcggccagcggggctgtggctgcctgggcttggaggttgcctgggcagctggggtgccatgtgggccgggtgggggggctgtctcccccagggagcaggctggctttggtgggagcagattgtgtttacaccttccccgcacacccagcccacgctcgcctcttattcccggggcctctcccacccctgggctctctgcgcagtctgcacatttgcagctcctgctgcagaaagttacctctctcagcctagagctccccacagaaggctcctgggacccgggtgccccttccttggcccactggctcccatcacagggcttagtgtgaagctcagggcaagggtggacctttaaatgggggaattaaatcctgactatgacactgtccccactgaggctgagtcctttttcatccctttccttgcaaagagccgctgcttgggaatgggagcaggagtgctcaggggcttgggagagggcagataaagggcagctagagagggagagctgagccaaagggtggggtcccttctggtctagggtgctggctactgtgaaataacaagagtccaagagcaaggtgtccagagtcagagctcctgggtttgaaccttgttccaccagcacatcctacctctgtggcctgggtaagtttctgaacacctctgtgcctcagtttctttagctgtaggatggagatcctactggtatctgtctcttagagttgtaagggttgattagataacgtgtggaagatgcttagcatgttgggtaagtgtcccatatatgtgagctggcacaatccggtttgaactgtaaattactgaacagtggtagattcaggacggctagagttcctcacatcctcactctctggtccttcctgccgtctctccacatacacagagctgggcgaccggtagttctgcaacagatcagaggatggcagagggtggcattgctggggtggggaagccccctgtaagcctgtactggagaagaccaccactgcctctctgtgcccagaaccatgtcccaacctccagtggtgacctcgacctggacagcgccactcccagctggctctgcttccggaatgaacctcagctccttgacaagacgggaggcgctgccctgctgtggtaccttcctccgtgtgaatgctaatatctctgctgggggagcctgagtgacggggaaaggctgcttggagctgcagggcggctgagggcagcaaccaggagcagggaggtgctgctcctgcaactgaggctcagagcggctgccagtctctcctggagactggagcatgaccagggaactaatgaggcggtgggggtgtggtgggagccagggaagtagccactgcagctgtggctgtccactgtcaccctggggtgtagatgtcaccttggggagtacccacccattccaagtgtgcggttgtgtgtgtgtgtggtttgtgtgtgtgtgtgtgtgtgtgcgcgcagtcctgggcaagggcaaacagtacaggtggtgggccaagactagatgggtagggcacagtgcccactatgagacaggcacaatggcgagagagcaaaccctgctggttcctcaggctcccgtagcctctctgtggggggcctcactgttaggaagaagcccaagacctagagctagaggaagataatgcttctttgtgaacctcagaagaacagtttggttcgcacggaagcttatgttaacataatgatgatactaatcgtatgattaataaccactaacatgcattgggcgcttactatgtgctaggcactgtgccagctgctgtattttacgcactgtttcatttatgcggcaggaactgttatcatttatccaataaggaaagtgaggttcacagaacttgctcaaggtcactcatagctggcagtgaagccaggacctgagcctgggaaatctgacaccaaagcttgggatagagggggcccaagtctcgagttgggggccgtgaggaaattttgattgtgacctgtctacaaggcacaaggaatggagctgtggtcccgcccagcctgcctttgcaagtgggctggtgttggccagggtcattgccaccaatctgtcttcaggaactcacattcaagggcagaccagactctaggccctgagaggctggttcttgcctgccaggtgagggggagaggagagctgcccctttaggacccctcagtcttcctcaggaaggatgtggtggcctctggcagggatgacagacagcgaggtcatcacccacagtcactgcaactgccactctgttgcctccttcagccaggggcagggccctggggagaggacaggatggcagccagcagcccagctggagatgcggagcctggtgaggaaggttgttttgatttgtttttgcagggggagggtgcaggccatggagaccaaggaggtggctttcagggggatccgctgacagtgggaagccagtccttgtgcctaaggagcacagaccctctctgtgtgacacatgtgccccctagtggggatgatgactgtagtgggggactgagaaaatttttaaaaatttactaacagactcagcctgtgcacctggggaggagaggccaatcctgtccctatgtgaacacacacacattcacacacacacacacacacatattcacacacagagacacccacattcacacacacagacacacacacacagagacacatacattcacacacacacatacacaaacacagtcatatacctatacaaacatataatacacacacagacatacacacattcacagagacacacattcacacacacacacacaacacacattcacacacacacagacatacacatatacatattcacacacatacacatacacacagacacacataacacattcacacacacatacacatatacaaacatattcacacacatatacacacacatacacataaacatacacatacatacacattcacacacacattcacacatacacatgcatacacagacatacacatatacgaacattcacacacatacacacagacatacatgtacacacacaaataaaacagacacacagaaacacacacacataatcacagatacacatgcatacacagacatacacattcacacatacacacacacatatacaccgacacatacacatttacacacatacagacatatacacttatagacacacatagcatacacatacacacagtcacacacacagatacacataaacatacatacacacagagagacatacacatacacaaatacacacagtatcatatgcagaggcagaagccatttgaactaagcattaaaataaattaatgtgttcatttggtcatttatttaacaagcgtgtcctgggaacctgcaatgtacaaaccctgtatcaggtgtcaggagtgacactcgaggagagacagaccctgccctgctggttggtcctataggaaggccccagcctcggtggcctagttctgccagcccaaccctgcctgtccctgtgacctttagttctctggacctcggtttcctcatttgataaacatttgtcaagcccaggtgggctggagtgaggacgcagaggactaatgatctcctcaggaaaagaacagtttagtaaaatgaaggggatggaccagaagctctctgggggccccaccgactttcccaatcgaaagcaactgtaatgaactgtgtctggagtgctgtgtgccaggcactgtggatccagaaacggattaagaccttctgccacaaacaaccagaaaactgggcaagatataagcagcagacacttgacaacaggcagcacacaggacagtgaccccatgactgcctcagcttctgcctggagacagttccctgactgtgccttggggaggggaaacccaagcggaccacagtggctttgctaaggtgaggaggagacagaatcagaggtcaagacagtgtgagattcataaggatatacacacagatcaatggaatccaaaaacagatgcagaaaggcaatccaatggagaaagaaaggtcctttcaacaggatacaaaaagcactaaccagaaaagaaaaatcaatacactggactttatcaaaattaaacctctgctcttggaaagactaggagtaaatatttgccaaacaaaaatctgagaaaggacttgtatccggaatacataaagaacttttacaattcgataataagatggcccaataaaaaagtggggaaagattttaatagacactacaacaaaaaataaacatacagctaaaatacatagaaagttgttcgacatgcggctgggcgcggtggctcacgcctgtaataccagcactttgggaaagaagaaagatactccacatgcaaatcaaaagcccaatgacataccactacatgcctaccagagtggttacagctgaaggccgaccatagtaagtactgtccaagatgtcaccctgtcatacacggctggggactggtgaagtgttacaaccacttgggaaaccagcatggtggttccttataaagttatcccagaggaatgaaaacttacatccacaaaaaagactgcaaagatgttcatggcagctttattactaacagctccaaactggaaacaacccaaatattcctcgacgtgggaacagataaacacactgagatatataaagatagaataatactcagcaatgaaaaggaaatgaactgctgatgccgacgacatgggtaaattgagagaagccagacacaaaagagcccctactgtgtgatgatgacatgtacacggaattctagaacaggcagaaccgactgatagtgacagaaggcatcagtggttgactggggccggggttagatattgtgggggttgactgcaagggtaagaaggtttttgtttttttgtttgtttttttttcttttttttgagatggagtctcactttgtcacccaggctggagtgcagtggcatgatcttggctcactgcaacctccacctcctgagttcaagcaattctcctgcctcagcctcctgagtagtagggactaccagcttacactaccacgcccagctgatgtttgtatttttagtagagacggggtttcatcatattggccaggctggtcttgaactcctgacctcaagtgatccacccgcctcggcctcccaaagtggtgggattacaggtgtgagccaccgtgcccagcctagaaggttctttttttttttttgagatggagttttgctctcatcacctaggctggagtgcaatggtgcgatctcggctcattgcaacctcgcctcccaggttcaagtgattctcctgcctc[131 bp omitted]gcctcagcctcccaaagtgctgggattacaggcatgagccaccgcacccgcctaagaaggtgcttttgaggtgacaacagtgttctaaatcttaactgggattgtggttacatgggtctatacacttattggactactgaaccatacattgtaaatggttatactgtattgtatgtaagttacacgagaataaagatgatttagagagttagaaacaaaacaagaatgaagaatgatgcttgttttgctcaccatctagcagaaaagccagacatacaaataatcatcaaacagtgggatgagtgttcaaagtatgttgaaataacacgaactcccatttatcaagtgcttaccttgcgccaggcgctgtgctaagtgccccgaagcactgatttaacgaagtcccgtgatgtttggatgatcctcctcctcctcctcattttacagatgagaaaataagactcagagagaagtgaggtgacctttgccaaggttactcagctagaatcagcagagctgggactttcctccaagtcctcctgggttgcagacaatgtgctaatccacctgccaccaggaaggtgccacgatgaaacagctcgggaattgttgcagcgtctcagtcaaaacttcgcaggaagtatttaagtacaagctggaatttgcagagcagagaagagaatgcagtgaagggactttcaaggcaacaggaacaaacaccaccacaagcaaaggttatgcaacagctgtgagaaggcaagggtttctgggcatggagagacatgcccaggaaataacagaagagatccatggagcattatatcgtcttcaaattcatttatttttatttttaaaaaatcaatttttgagtaatactctagaggcagtggctctgccaagcagggaagtcaaatgcatcgctttttttcctgtacactgttggcaagcacagataatccacaactccaacgccatctattctcaatgcgtagggtctgtgttatatttctcctcttccagaaagttaaagctcggtgaaacttaaagcagtgatcccaggtttttaaatttttatatttttacttttcttccatctgcctggtcatctgcatgatcccagctttctgaacaggatttgtgacactgtttcacggtcctaagaactctcaggaaaaaatcctctatattttcatgacaggttttctaggtgggtgaattaaagtctctggagttaagcaaaaacggtccactgtcatagcgtaatttttttaggaaacatggcatggtggctgagaccatgggtttttaggctggattgtttgagttcagatcgcagtgccttcacttatgagttcctttaacctttctgcaccttgacttcctcagctgtgaaatgggaaggtgggggggtgggggataatgacagggctgtcatgagaatcagatgagacagtgaataaaaggtgcttccagagtacctgccacagagtaaacacttcatatacacatagctgttatgatttccggaaggaggcttgcacacatgagctcattttctgtattctgccatgatccattcttctgggaagaattatttttaaaagatatcatttaggatgatttgactgaaacagaacacccaacttaaaatgacttaata[136 bp omitted]ctgcctcagcctcctgagtagctgggactacaggcacccgccaccacgcctggctaatttttttttttgtatttttagtagagatggggttt[141 bp omitted]cattgcttgtaagacacatcctgcattttagaatatgaaaatgcgaccagctgtgatggctcatgcttgtgattccagcactttgggaggctgaagtgggtgggttacctgaggtcaggagttcgagaccagcctggccagaatggtgaaactctgtctctaccaaaaatacaaaaattagctgggtgtgatggtgcacacctgtaatcccagctacttgggaggctgaggcaggagaatcacatgaatccaggaggtagaggttgcagtgagctgagatcatgccactgcattccagcctgggcgacaagagcaaagctctgtctcaaaaaaaaaaaaaaaaaatatatatatatatataaaaatatatatatataaaacatgtatatgtgtatatatatgtatacatgtatacatatatatgtgtgtgtatatatatatgaaatgtataaatgtgtctctgaatcaaaacgaggtctgaagttcaggggtgttgggactggcggtttctgcgggtcagcagcatcactgaggactcatgttctttcttctctctactctgccatcgcagtccttcagctcctacttaatggaagcctcgcagatgcaagatggctccagcaggcccagcatcacttcttctcagtgtcccaaagccagaagagaggctgttgtttttaaaagcaggaaaactttcctaaacttggccagaattgcatcacagaccctttcctaaaacaatttccagcaaagggaatagacttaccatgtctggtacagatgaatcaaggtttgcccctgggggctggggaggggcttgtcccgctgaagcagactcttgcccagcagctgaacgaagcctaggttcaccagacggaggaagagactggccactaacagtgcctgacacacagatgtgcttcctgtgatatcgctgctgccaccgttccaaatgtaagcagttggctgtctgggatactacctaccttcttttgtgttcttattaataaaattaaagattgctttctgggtagagaaattaacctcaatattctaaagactgttttatttttatgtatttatttttttgagacaaggtcttgctctgtcatccaggctggagggcagtgatgaagtcatggctcactgcacagcctcaatctcacgggccccagcaatcctcccacctcagcctcccatccagctgggaccacaggcatgtgccaccacacctggctgtttctcattttttattggtagagacgggggtctccctatgttgctcaggctggtcttgaactcctgggctcaagtgatcctcctgccttggccaaccaaagtgttgggattataggcatgagccactgcgaccagcccaaagactgttttctattactgtgggtttcagataccatgtcttaaacgctgtcagtgaccaccccaatacagcaggccagctgactggattttccctttgtactcagagcctgggtccctgaaaagcgctggggacttttgctttcctgtttgtaaagagtcactagactgtgactctttccatgtcaataaatagaggtctgcactagcctggtataaaggctgtataataattccacggtaggtaaaactcaaatgtcctagctctcaccagcaatgagtgcaaatgagatcacagtaacatccacatttcagtctcaacagctctgagcccttgccggctcattcaggaattctgatgcattctctgaagtccccctagttatttctgggttggctgcacagtgtactttacatgtgctcggcacaaggcctctcattgtatttcgctccagcctcttggccactgcccagctgccctggcatccccatctgccatgaacctgctgttggggaagcgatgtccagtcaggtgtgaaagcaacttggtggcctgcggcagagtgaagagctgtaaagaatggccctcactatacactgggtggcatccaggcccaatacagccctgctagagcccagagcctccatcttccacacatcagctctgcagcctcccatcctcactcttcctgccacgaagtggctcaaatggcagagcaggtgcccattgttccccctttcaacctcatttctgattttgtccccaaccacccctacaaacacatgaaaatcttcttccttctcccttcctccccgaaaacaaaagtccttatacataaggtcaccttattcattagcggtaaaagcatggattctacaggctgggagcaaaccctgaccctgccagttactggttatgtgaatttgggcaagttaccgaatttcccagtgcttctgtttccttatccgtaaaatggggacagtgatagtgttaccggagaggagtcctgatccagaccccaaaagagggttcttggatcttgagcaagaaggaatttgggatgtctatagactaaagtgaaagcaagtttattagaaaagtaaaggaataaaagaatggctacttggccaggcatggtggctcaagcctataatcctagcactttgggaggctgaggcaggcagatcacttgaggtcaggagttcgagaccagcctggccaacatggtgaaaccctgttgctactaaaaatacaaaaattagccgggcgtggtggcgtgcgcctgtaatccagctactcgggaggctgaagcaggagaattgcttgaacccag[141 bp omitted]ttatttcttgattatatcctaaacaaggggtggattatttacgcctcccatttttagaccacatagggtaacttcctgatgttgccatggcatttgtaaactgtcatggcgctggtgggagtgtagcagtgaggacgaccagaggtcactctcatcgccatcttggttttggttttggtgggcttatttactgcaaactgttttatcagcaaggtctttatggcctgtatcttgtgccgacctcctgtctcatcctgtgacttagaatgccttaaccgtccgggaatgcagcccagtaggtttcagcctcgtttcacccagctcctattcaagatggagttttctggttccaatgcctctgacagtagtacttcatcgcattgtgaggattaaacgagttcatacatgtacagaaaccagtatagggaatggcacctggtaagtgctatgaagtattagctatcattactatcttgtctacagtaggtcaccagcccgctagcagcttttgggaaattccacacttagaattcccactgtaagtctcaaatgaaaggaactatgtttgcagggatagaacacattcttcctttcagtattacacaaaataacgtgtcttcaagggtaaggtagagaaacctaatggccagaattactgctgaatgaattaatgattatttgctgaagacttactgtgagcatagcaggtaaataccaaaccctgca[137 bp omitted]gagaaaccccatctctactaaaaatacaaaattagctgggcgtggtggcgcatgcctgtaatcccagctactcaggaggctgaggcaggagaatcacttgagcttgggaggcggaggttgccgtgagccgagatcgtgccattgcattccagcctgggcaacaagagcaaaagtccatctcaaaaaaaaaaaaaaaaaaaaataataataataataaaaagagacttctgctcttgaagagcttacaatcaaatgaaaggaggtaaacataagcaaatgtggtaatttgaagataagtatctgcaacatattaccatctgcaggacaatataacccacaccgaaggccacagagatcactgttaatgggtggatgagaacagggagactggaatggagaaaaggctctcggtcttgcaaacttaaactagctttcaaataggtgcaaattctggccctgattgttgatgtcgtttttgccttatttttatttcaaaaacgaagccagaccgggcgcagtggctcacctttgtaatcccagcactttgggaggccaaaacaggaggactgcttgaggccaggagtttgagaccaacccgggcaacatagtgagacctcatctctgcaaaataaaaataatcagctgggcgtggtggcgctcgcctgtcgtcccggccactcaggaggctgaggcgggaggatcacttgagcccgggaggtccaggctacaataagttatgattgcaccactgcactccagcctgcgtgccagggtgaaaccttatctcaaaaacaaaccaaaaaaacccagaaacaaaaaaaaatgaagccaaggtgtttgcctgaaaaataacactcagaagagcagtgggtgttacatcattctccgttcttttcgtaattcagctcgtgacacttgcctttttttctcttctcggaatgccccgggcccctgggcagccgcggaggccgagccccgtcgctctccagcgctccttgccgcccgcgcctcggcttcaccggcctcgccccaaacttaaaaacacctgagcaggaggttgaacgattccctcggaatctctcctcttcactaacccagcgaaccaccccaaatgcccctatcctcccccaaataaaatccgcagagcaattaacaaagatactcggccaagccccggtttcctcatctgtccctgccccctcgaactttctgtgcttccccagtctcgaccagggacaaactgtgttgaagctcaatgactttctggcagaagtgaacctccagcttcgttttctgacagccgtggttcttcacaggcctggtttcccactccggaccctccactgcccctggtggcggccaccatcttacccccagctccagggtcgcgctgaggacgcggccagcccccagccgccgtagttttgaactacatttcccaccagccctttctcaacatcgcgagagttccggagagattgccgagaagacttgcgcgcaggggcggtctcgcgttcttttcgaggtcggccgcgtggctggaagacatggccactccagtcggtgttgagcacggcgagcagtctcaggcctttagtgatgatggtaaggctgcctgggtgggaaaacggggtcttccttgacacgacactaacatacttggcttcccttcctcagagacgaagtggtgacgataatctcggtttctccctcatagggtggttaggagggttaaaagtactggatgagaaaatgctttccaaacgttgagaaaatgttactatgtgaagggagagagctcaagcccgtcctcggcgtcatagggccggcttctgcgggggagagcgcctaacaacctgggcagccccgtgcgcctccgccgcgcgtgtgctgagcgtcatgcccaggggtcttcggtgcccgcgcacgggcagactctgacgatggtggttcttaattcagcatcaggagtgttaacgtgtgaagacgtgattccgcttggagtgtcttgaggacggccccaatcggtagttcatatttagctttacagataggagtcaataggattgtaaacttctggaaagccgtagttttaacaacgagccttttttcctcccccagaggcctttctttgtttggcatctgcagagacggtgaaaagcagagctccaggttgaaggatcagagtaatagatggagcccttaacatgagtaagagtgggtgcaggcagggcctgagtggtcactagaaatgagaaagcacagttggtgccatcacatacattcacctcctgctttattctgaagttcaagtatgagaatacgtgttgacatacaagccagctatggtaagaaattactcaaaattcagaatgctaattattttaatgataaaaatgagtagcgtctttgcccgtgtgatttggggccactaggtgtcattgtaaccagcgtggatcctcgttagggcatgcagggatgaaagagacatggcaaatgaattttggatcgctaggatttaggaatctttgttattggctgagctgaggatgatttaaagttatccctgtctgaaatggtatcttttgtgaggaggtctgacttgctgaggctcagctgtttaatacaaatctggagaataaaccttaaggtggtttctgttagaatgaagcctgttatccttctcttttagattaaaggtggtggctgtggccttgaaaacagtcatgtgaaaactcatcaccttaaggtgttaagtgtaaggatcttcatgatgaaatttctgtaaatggtgagatttttagtactttcatagacttgaatatgcttatggtcctctttaagtattggtttgttagttttggggatgtgttggtcttccagggttacgattgcccagataatggaagtagtatggaattccttttgatagggtccttgccaagcactctcataaagagcattttttgtttgtttgttttgagacagagttttgctcttgttgcccaggctggagtgcgatggtgcgatcttggctcagcgcaacctctgcctcctgggttcaagctagtctcctgcctcagcctcccaagtagctgggattacaggcatgcaccaccacgcctagctaattttgtgtttttagtagagacggggtttctccatgttggtcaggctggtcttgaactcccgacttaaggtgatctgtgctgggattacaggcgtgagccaccttgcctggccataaatagtatttctaatatcaaccccatatgaggtaaatttttttccccactctgctgctgagtaagtaaaagtgaggcgtaaagagttcttttgcccaaagttatacaagcagttactgagttagactggcagttctgaactggggagcgatggtgttcctggcatctggtgaatgctactattaataaataccctggctgggcctggatatttatctcatgcctgtaatcccagcactttgggaggccgaagcagatggatcacctgaggtcaggagttcgagttcgagaccagcctggccaacatggtgaaaccttgtctctactaaaaatacaaaaattagctgggtgtggtggcgggcacctgtaatcctagctacttgggagactaaggcaggagaatctcttgaacccaggaggcagaggtttgcagtgagctgagatggcaccattgtactccagtctaggcgacaagagcgaaactctgtaaataaataaataaataaatatcctacaatgcatacaacagcctgcatgaggaataattgatccacccagtatgtcagtagagctgaggttgagaaactcctgtataccacacgttaggctaactagagatctgagctctagtctcagcctattttctcaccagagtcttgtttcttcatttgtgaaacagggttagtgatttccaaacttgattattacatcagagccacctacaaagtgttaaaatatacacattcctgggcctcacctccaggcatgggtgagaatggctctggagtggagtccaggaatcatgtggccagtccaagagcaagtgggtagtaactagatcaggggtgtcaatcttttggcttccctgtgccacattggaagaattgtcttgggtcacacataaaataaactaacactaatgatagctgatgagctaaaaaaaaaaaatctcataatattttgagaaagtttacaaatttgttgggctgcattcaaagccgtcctaaagtttacaaatttgtgttgggctgcattcaaagccgtcctgagccacatgcaggctgtgggttagacaagcttgaagtagatgatctgatctgtttttagtgcaaggattttattatagtgagattatagtgctggctatttttaagtagctcttgggcaaatctctaatcctctgtcttaaaaaactgaaagcctggagggcacggtggctgacacctgtaatcccagcacttggggaggccgaggcaggtggatcatctgaggtcgggagttcgagaccagcctgaccaacatggagaaactccgtctctactaaaaatacaaaattagcctggcgtggtggcgcatgcttgtaatcccaacttacttgggagtctgaggcaggagaatcacttgaacccgggaggtggaggttgcagtgagccgagatcgcgtcattgcactccagcctgggcaacaagagtgaaactacttttcaaaaaaagaaagtcacatgcttgctccacaaagaatttgcgtgagggaagtgaacaatttgatgagaaaaaaatagtttgcgtgtgctgtggctgttagtgctatggtccagcaggttggtgggagctgagtccatgatgatttcaagttatccctgtctgaaggcaaagaaaggcctttctgtgtggaatttgaatatctgaaactcagtttcccaagtttgccttacagaaattttaagttacttgagagttactctgtgtgtatcttcttaagtagttttttttcttaatttctcttcccaggtgcagtcagcctcagtttccaaagccggaaaaggatcctctagtagccacggtgtggcagctgctctgaaccaggacctggacccggacccaaagtgccatgtctttaatgtgagtaagtagacgaactggtaaacaggcttggtttggtttgggggagtggtaatcttttttgcttcccctgctctggacttaaagcaatgggggcagggagactttagtagcattttgttgctaggtgtctgcaataagagacgaaactgaactgctttgccggaaacaagtgaaatgattgctttcctgtttgtaagatttgtttacatctttcgtatccgtaagaagtcccacaagcctatgatggttagttatccctgtctgaaaatctggactgagggaaataatctattctgaggcttaagggtttggctccatggttttttttttgtttttgttttttttcccctttttttttccctcagcatatcctgctgagagcccagtctagagcatcattcctctaaaacgtgaaaagcaaatgagtgattgtcctgctttctctagtcctttgattatggctctgaggatacaggctgtatgaggtggcaggaatgcacaagtacccaggatttgatttatgcccttattgtggaatgaaagtgcttgttacatatttcaagaaaatgaatgcgctcttagaaacagattggaatgtaggatgtatgccagcttgtggcaatgagaatgcttaatgactctgaccttgcctctgctccagggtcctgacatttaggggaaaccacggctgtttggtttctatgtgctttgttaaggacgccagggaggtctcctaagtttgtagcttagatcctgtctgaatgtcacgactggcatgtgagcaagaaagaaaccaagtggtgctggagagtggggtgcccagctttgttcccactggaatgccaggcttgaagt[225 bp omitted]gaggcaggagaatggcgtgaacccgggaagcggagcttgcagtgagccgagattgcgccactgcagtccgcagtcctgcctgggtgacagagcgagactccgtctcaaaaaaaaaaaaaaaaaaaagaaaggggaggtgtgtgcaaactctttgtatttaaggttgtgtttttgctggacaccaaagaagctgtattctgggtgagatttaatgagcctaaaaactggccccagtagtttacagcctgcaagtaaaacagtgaaaagggtagcttatcaagtggttattgtctgctgagtggacttgactacagaactcaagtaaaccataagatttgacttgaaatgtttctatccagagggagtgctttctgatagttgtttactggcctcttaccagaaactgctccctcagagatactgtctccttaaaatgagtcatcctggatctccaccagcctgcaccaaaatggtgtgatagtgccccgttacgctcccccaacgcgcacatgcctgccggtggtgagagtgagtgctcttggactgactgcctgttctcccaaattagttgttatatagcattcagttttgagtcacttccttggctgttacttcaaattattcttctgttttataggttagctcccagcgatgccagatgggatcagcacagccctgcctctgctgctaattgttcctctaaagtaatcgccatgcgttctttgggcttcatctttaaaggaatgaagcaactgagattattctggaaaaccttttggcagttagtgaaattagagtacaactaagaacattttcagacctccactgtggatgacctgggtataatctcacaaatcgatgggactgcaaggattgtaaactgaaatgaacatgattatactctgttggaagagcctaagaggaaactgatgccatgagtttcagagagtaatgcttaaccccagttacacaggatgccgtcttgtgtttcctcttgtttagttacccactacagtgattttgtgatctgctaatgggttgccacccacaaccattgctttagcacttttacttcaaatcaatgaaggattgataaaagttctcctggtgtctccgcagagtgccttccaggaacagatctttgcatagaatatcagtggtttccttttttgtttcaaatagtggtcagaaaatacccagtgttgactcaccaaggcaatcagcttcctttttccctttttttgttttttttttaacattttatatttttgctttattttattttattttattttattttattttattttattttattttttgagacggagttccactctgtcgccaggctggagtgaagtggtacaatcttggctcactgcaacctccacctcccgggttcaagcaattctcctggctcagcctcctgagtgctgggactacaggcgcgtaccttctttagtagagactgggtttcaccatgttggccaggatggtctctatctcctgaccttgtgatctgcctgcctcagcttcccaaagtgctgagatgacaggtgtgagccatcagacccagcatttttttttttaatttaaatttaaattttttttcatttttttgagaggttttttttgttttgttttgttgttgttgttgttgttgtttttgagacagtcttgctctgtcacccaggctgggagtgcagtggcatgatctctgcaacctctacctcccaggttcaagcaattcttgtgcctcagcctcccaagtaactgggactacaggtgcacgctaccacacctggctgattttttttgttttagtagagacagggtttcaaccatgttgcccaggttggtctcaaactcctgagctcaggcaatccacccgccttggcctcccaaagtgctaggattacaggtgtgagccaccacacccagctattttttctttcgttttttaattttaaagttgggggggggtctcaatttgttaccctggctggtctcgaactcccggacttaagcgatcctctggctccaagcccactaccagtctcaggtttctttactaaaagatcactacctttttttctcttatctgctgccatgtgagatgtggctttcaccttccgccatgattgtgaggccttcccagccatgtagaactgtaagtccaataaacctcttttgtaaattaaaaaaaaaaaatcactatttaagatactaggatggattgtgactgttgaggagtacttacatatcctacatttgactacattatttccaaaccaagtattccatccaaaggaacatactgctatcatagagaccaaggagggactgtttaaggttgccaaggtgaagcgagctgagaggctttgtcctcgtgccagtaactctgaaatctctcttaattcctgctgtccaggcagcagaatgccatggtttccccaagtaggtagctgctttagcagttaaagcccaaatgtctgttctgttgatcagaggtctctgaatttctgaagtggtgtttcgtttctggtgactgagttaatcctttacaatccctcttgtaaagtgtgctaatagaaagaatccacctttcaaagctgcagaaccagaccgtgccctaaattgaccaacgtaactgatgtgcctcaggaagtctcttgccagctgtccctgtgaagacccccctcctcccccccagctgctgccttgcacactgaagcatctcagactgtgcaaagccgtgtagtcatcaagacagtaaatcccagggcttggttaagtgctgtgtgataacttgtttggatgagacttaacttaaaaccacttacaataaacttgggaaactaccgtcagctgagttcaaatttactgacgccatgatatgaggatgaaggtttattacctggtgacatcatcctgttggtgacaaggtggtgatacatctctaatgggacttccctcagtggcaggcaggctgccaagcaactaacccccatcaagtgccagaccctcccagtgttctgagagtcatctccatgctaaacagcctgcgttttatatgatttctctacccagccaaaaaaaaaaaaatggtccatcatgtacgcagttatctagtcttaagttatattctggcttttttctcccactttattatggagcagaagtaagcctatcatgttcttagaaaggctcttaagaggtgtcctggagtccttgaatcactttagcatctggggtaggatgtgccaccaggaggatttgggctggagcgtgtgtgtttgcctttgacctggactgctgtctgatcttgctgaacactccaccgacatttcctaaagttgctcagtgccaatccagcaaagcagtccattttcccttggccaagattgagatgtattgttttagatacagaagagttcttggatgagccaaggacaagctggggtgtcctatattgaacagacctcgatgaaaatcttgaattcaccccagtgccctctgttggcaagggaaggtgaagattgaaaagttaaaaaagcttttggccacttgagaggatcagggccgcaactcttgaagaagcaaagggctcagtgcattggggtcagcgctggtacagctgaaggatgccggccttgtgcaggtccctccacagggcagcttccagggacagatcgtggtttgcataaaatatcaatggcttcatttttcgttcgaaatagtggtcggaaaatttccagtagttgcttgtgatgaatccataggcactgacctgggcaaggatagtcgctggattagtatttgttgagcgtctagtgtgtacagacacttgggtgaagtgacatgagtttagaaaggtgtccgtctgctgaggtgaggataatggtctagggcttattcccacttagcaagtggggagatggattcaggggtgactcactgtgtccccacttggcatagctggtgattgccagagctggatttggaactcaagggtggaggcaaaagcccattactactctctccatcctaactggggactgcagtcaagacactcctgcatcagaataggaaaaggccctgtgtggtggctcacgcctgtaatcccaacactgggaagctgaggtgggaggatcacttgagcttggaagtttgagaccagcctgggcaacatggtaagaccctgtctctacaaaaagtaaaaaaaaaaaaaaagagctgggcgtggcagtacatgcctgtgatcccagctacccagctacttgggaagctgaggcaggaggatcatcacaccactgcacttaagcctgggtgacagagttgagaccctgtctcaaaaaagagggaaaagatttaggtgtgagtcgtggagaggcatttggcccccagctctccataccagctttagcatgggtcacggcctctccttgaaagctgctgcttggcccctgcctccatgagcttcacgtgggtcatatcccatcaggaatgactcttaacggtgatttcaaagtagttgcatgtgggaggctaaacctgctgccctaccccagctctaggatgtccccataaaagaatgtccctatttggcccagtatgttgaggactttggctttcacaagggcagtttgatgatttgagccttaaataccatactgagtggctgccttggagaagagtgaaagaaggaagcctggggcaggtgtcaggagccaaggcaagcctgaggcaggtgtccggagccaaggcaaggctggcccaggacctgtccttcaaaggccccagggttgtgggcaaggaagtgagcagtaccagcagcactcttggaactggggattccacgaacagaggccaagagtcccagctccgaggtaagggatatcaggggatcctgttgggttctgttatcctgtgttctgccggcatgggcttctggaagagaaggcctcttacctggtcacaggtatgcaaagctgtcagcagcatgagagccccggtactaggcatatataggtctccaaaatgtgtgttaatcaactttgatttcaagaacctggaagcaaaaagagacatttcagctcactagcttgatggctatcatcacacttcacaactacacattcaaataggtgggaaaacttcaaaaactgagggccttctactccagtcagttctttattcggtccaagtggactaaatacaaagatctttgagaccttaggtaaggttgggggagggggtggtgagaaaggaaccacaggttcccccttttggcaacagcttgttttcaccccaagctactaagtaaccacactgccaagggcataggtggcctgtttatttagcctgagactgcagtttctctctactccacatcttgattaagtaggaatcacgtgtgagggacagggagctcagaccctgtgaccggacccacacagtccaagagtgaggccagggtgtgaccacgggctctgccctcaggcctgagttcacatcgagctgtgccaggccgatcacctgacctctcagagcctgtcttcctctgtagcacgggactaattagaggggcttcatttgcctccccacatccacacacccctctccaactgctccctgccctgggattcgagcctctggtccacagcagggtttctcagtctcagtgctgttgacacttggggccaggtgcttcttgtgatgttcagcagcatccctggcctctacccactgatggcacttgccgccaccacccttgtgacaaccccagacgaggaccatatgcacatccacattgagaacccctggcaggagggagggaagggggttgaggctggtccccgggttccttccggcaccttgtgttggctgtgtttgggcctgaaggttctgatgccctgctgctgacggcgccactgctgctgtgcaccttatggtcccagctcccagtctgtgcctttgtataaacctccttgagttatcctgagtttcctgtccatttcctggtgactgacatatatcaccctccctctatcaaggtgctaaataaaacagtaaatgaagtgacagtgctttgcacacagcactcgggacagtggagctctggttatcggtcagtgcgtggggctcgtgcgagggcgctgactggatgtgggtgggtgtgtaaaagggggaaggaaggggacgctgttcttcaggcaccccactccgtacctttctgtcaggtagctgatgaagtccggatgtagcagcttgaatttactggcagaggcttctggtccaaaataggcgtgcggcctaggacccatgatagaagtggacagagcgcccagagccgtcgtattgcaagggggagatggaggggagggtcagggcgccggagtagccgcggtaccctgagcggtaggagcggggctgggagtagtagcgggagaagggggtgtagaaggtggcaggcagtacgttggggaccacgtgcggcttcccgctcaccaggacctccacgggcggggtgtaggagagagaggaggggggcatgaacagaccggggggagttgggaaggggcagttaaactgggggtggtgggggggcgggggaaggagaggtaagtagagtgagtcaggagggggtgggggcttccgggcagggcagggagagggacaggcaaagcatgggttttggggaagtggtgctgtggggggctggaaaaaggggggctccttcagaaagcggggcacatagggggtgatataggacgggatgttctgaattggcccgatataggaagatgaggtggcagggctgtagaaggaggacttggggggcacagcgggggttagggaagggtttcgagagagggatttgaaaccagactgggagggagatttggaggtgggtggggtgggggtttgggcagccccgcggggcacgtgttggacctgaggactggggttcagggacgaagtccgggaagagggctgtgaggcatttggggtgggagggtgggaggggggccgggaggaagagccccgagtgggggagggggaaggggcaggctgctggcctggaggggtgacaatgttgttggaacgggactgggagggagactgggtaggggatggattaggggtgtgggaaggggagctcattggtgttggggaggcttaggtccacccgatgtctctgaggcagcccctaagggcccaagcccagcgtgtcacaaagcccagctcagaccagcagtggaagcaattgttgggtaatcaccaagcgggggtggggtgggcctggctttagaacccttaacccataaggaccacctgtaaagctgctctgtggggggtggggaagatgtcctcagcgagacgccgagataggagggctggttgtctgggccacagcagtggcgtcgatttttagggacctgatctcagggacaagaaattgtctcagaacccccgggaggaggttcagatgagggtcaggtcgtggctcaagagagctggacccaggcctgctgtgcaggaaggtgggaaagaagacaaagggcccattgtttccgcctctcaggacactgggcctcgagtctgctctcccgtttcatgggcatgaccctgggaaggatgcccagcaggaggagtggcccagactggccccaactcttgtttccagcacagtgtgctcagtgggacagcggacccagcccagtctgtgacccggagccgctggcggctgggctgggcagggagagtgcagcccaaagccgagaagccagacctgctcaccccattcagaagagctgcctctcccacccccagcccactgcccccagagggctactgggaacccggagggtcacctgggctttccaggggtagacaaaaagtagaatttcccagtgctgttatgtgaataattggggatgattgaattcttagggctgttcttactgcccttcacccacctcctcttaccccatgatgggccctgggagcaaaaaggagataaccacagtgtcccttgcccctctgccacgccccacaccaccacggcctggctgctcacctgtcccctttatctaggccctcagggacaggcacgcccagaatggccgatctcagcatcacatagtcgcggatgtctgaggggatgaagatatactgcaggtcctgtcagaatagagacaatgagcccagaggggaaccaggacatgtttagctcctcagtgtggacagccctccacccaaccttgccccctgagccgactggagaatttcccttaaatacctttcattcccacccagaggtgctgtactggtttcagtgtaggtccacaaatcctctaatgctccttcaggaggtggcacccaattgccatcccctggagtatgggctggacttagcgactcatgcacaggatttttctgataaagaggaaagtgatggtgtgtggcttagagactaggtcataaaaggcactgtggcttcctttacgttctcagatcactcactctggatgaagttagctgccatgtcgtgaggacactcaaatagcctacagagggcccaagtggcaagggcccgtgagacgccatcttgatgtcagctccagtcaagcttttgggtctctcagatgatgcagcccatcatctgcacctgggccaaaacctcccactaagctccccacaaattcctgacccattgaaaccacaagatagtcaatatttgttgtttaaagccaccaagttttgaggtcatttgttacacagtaatagataactcgtacatgtactgtggctacactgaaactaaggccaggcgcggtggcttacgcctataatcccaacactttgggtggccgaggcagacggatcatttgaggtcaggagttcaagaccagcctggccaacatggtgaaaccccatctccactaaaaatacaaaaattagccaggcgtggtggtgcgtgcctgtaatcccagcttcttgagaggctgaggcaggagaatcgcttgaacccaggaggcagacattgcagtgagctgagattgcaccattgcactccagcctgggtgacagagtgagactccgtctcaaaacaaaacaaaagtctaaagctgctctattttgttccacttcacagaagagaggttctagtgtgaggactcagtgtggcatagacactatggtaggacactccttaagcccctggtcaggggaggaagcttctagaaacccaactcagcttcctccggcactgcagatccccttttcctgagatcccctaaccctgtggctgtggcacccacagcccctgaggagggaagctttgagttaacggcctttgggtgtgggtggaggaacctggaggccagcaggtagggccagatgctagctcgcatgcagtggctgccacctgggacacgtccctcagtgtctctgaccctcaatttcccacacagggctattgtgagatttcaagaggccacacatcattcttccaggggccagtgtggggaaatggaaacaaccccagcgctggggtcagagggtcctagatctagatggttccagctgggtgaccctggacatgttcctgaacctctcagcgtccctgctttgtcatctggaaatgggtacacgggtcccactcagggctgctgtggtgaccgtgtgtgtgccctgtaacatgctgggaggaggaactccataaatccccttctcctgggagtctgagctccccaaagaatgccagctctcgaggtggggggtactctgggtgcaaatcctgaccctaccgctgactcactgaatgaaaggcaccaggcttttatccccacaccagtaaaaccatgggttgcacggtctctgtaaagtgcctggcaagtcacaagcgttgggtaaatgctggccattcacatcccatactgcagaggagtcccgtgacgcctgaatcagcagggagtccgggaccagatcccccctcaccttcagtggctgtatcttgcatccagaatcctggcaccccctcagcatccactggaccagggtgtgtgagccctgtggcccccactgaggggactccaggaacaatggtgccattgtcaaccacaatggcatgcccgccagaggcctcacctgtccttgtggcacggaggtgaagcccagattccagtaggagacgagggagttcttcatcgtgttcacagtgaaaccatagaaggaagtcttggtgcccacatcgcgctcgaagcctttgatcacagctccattgagtctggttggcacagaggcccatcagtgtctgcggttacaccaggccgtctgttctgcttccatctccacggctctgcctggcctatccccctgcctctgtatgaccactccttctgcccatggcagtaccagtgcccagttgtcaaccagacccccactcctccagacctcaaggggtgacgccctgtgagtgggtagagctggccctggcggctgcttcctcctgggtcccctgcatgggcacccatgctccgtcctcagggcctactgtttgtttttgccttgtccatgcccgtgtgctggtcacaactgctgagccgcccaggccactgctgccatagcccactgcccctgggggagacacccccaccctccaggcaactctccctcccgcccctccccagctcctacccctcatacctgaatacatagtcatgggcatcgatgttgggaccctggcgggacccattcagaatgcctccgttgcccaccacggcacaccggatacactttggaggggtgtccctgggcggggcaaacagcttggcactctctgagccgttcagaaggctcagggtggaggcgatgactgtgggtgcagatggggagcagccatgaggagggctggcatcgggggcacctggggccttccctaggctggttctggtgccccatctcccctgaggcctgaccctagcccctcccaagaagcacagagggtgggaggggaaggagatgtctgtggggggagaattgaaaagctgacagtggaagagggggcttggcggccttcacttgtcttaagaacttgaataccttatcttcttaagactggtgctagagaagtgagctcagggcttaaaaaagactgggctgggcacggtggctcacacctgtaataccagaactttggaagggtgaggtgggtgaatcacttgaggccaggagttcgagaccagcctgggcaacatggtgaaaccatgtctctattaaaaatacaaaaattagccaggcgtggtggtgcgtgcctaatcccagctacttgggaggctgaggcacaagaatcacttgaacccgggaggcggaggttgtagtgagctgagattgtgccattgcactccagcctgagtgacagagcgagactccatctcaaaaataaaaaagactgtatattgcaaaagaaaagaatcggaggcctgtgggggtttgggtgcaggtataatgtagagggggctctgggcctgcagtgtgggggttcctgcagcagcaaccgtgagtgaggtggtttgaggccccacagcctctgtccttggccaccattggacgctgcagcctttcttgccagggaggccccaggatggtgaggcccactggcgggggcagccccatgactctcactgacccctgggtgcttggacggaggagggaggtgaggcaggagttgcatagctggggcttctgggaggagagagggggacagggagacctggcatcaccagtgctatgagggcagagaggcctggcctacttcagggcaaagagcaggaagctaaggcagaaggcaggtgagagacagcgggcgcgggttaccttggtgagagagcccccgccagccatacggggctttgtgttggctcaggcggtcccagagcgctggggtgaagaggtccccccacagcagcactggaatggagagattgaacaggccacggaagtgggggtgccgctgaatggccaggtgaagcaggtgtcggcaggcctggccctgtgggtgagaaggtgagggctgagccccgttaggtaggggctggggtgggtggggccctgcagaccctgcaggggagttgcgagttgtgagggaag[150 bp omitted]tgcctc[224 bp omitted]ggaactttctggatttagcctgcctagctcttcctctcccagaggccatgtccccttggcctggtggttctggcctcacactccttcatctcacgcttgagcaaactctggggcattttctgatgtatgggtctgacctgcctgccctttggtggagtagtttcagcctgggctgagctgaggctgtcaccctggatgcaaaaccctaaccctactggtactcgctgtataatttgtgtgtgaacaggctgccaggaagatccgtgatagtctttctttccagtggtgcctttagggagtggaagtgtccccccaaaattcattacccagagccttggaatgtgaccttagttggaactagggtctttggagatggaattagttaggaggaggtcatatagggtgaggtcaggccctaactagcatccgtggaaagaggccgggtgatgatgaagcagggatctgtgcgatgcaccataagccaaagagcagtggagccgccagagctgggaaaaggcaggggaggctttcttcgagccttcggagggagcgtggccctgccagcaccttgattctgggcttctgggctccagaactgtgacgattcaatttctgtggatcgaagccccccaggctgtgatcatttgttccagcagccacggggaaggaacacagcacctctgtacttgtgggccttgagggagggtgaggtcaggaaacaggccccagccttgtctgcccgtgaccccacaagttcagaatcacacacagtcatggcctgggtgggccttctattactcctgaatggggctctttgttaagccattcgtttgatcaaaagacaaagcaggaaatagctgtacagtaatttctgctataatgcaacttatgagtggctaaatatcaccatgctatgcaaagctatgcaatcatgatcatggggtagctgggcatgggggctcacccctctaatgccagcgctttgggaggtcaaggcgggaggataacttgaggccaggagtttccagattagcttggtcaacataacaagaccccatgtctgcaaaaaaatgttttttcattagccaggcatggtggcccagacctatggtcccagctacttgggaagctgaggtgggaggattgcttgaacctgggagattgaggctgcagtgagctactgagactgcactgcagcctgggcaacagagtgagaccccatctcaaaaacaaaacaaaacaacaatagcaaaacgaaaaaccacgggcctatgagaacatgggatgagtgacataacactgaaacgctgtcaggaatgcgtaaaaccaaagatacaaatcgaagaaagacagaagcacagttttactgatgtcccgtggttaaagaatacttgagattgatgtggaagtgggtgtggaagtgggtgtcggaagggggcagtttgtgtgatattgtgaaatggtggaaagaagttgtctgaaatcggagggaattgtgccaccagactcactagggcaggtgaacccataacacactcggtgaagctgatggagatttcaggtgtgcatgtgtgtactttttgtgtattcctacatggctctgctgagttgggtgtggtttctatgttaacctagagttttcactgacaaaaccactcaaaaaaaaatccaggccgggcacggtggctcatgcctataatcccagcactttgggaagcagaggtgggtggatcacctaagttcaggggtttgagaccagcctgagcaacgtggtgaaaccctgtctgtactaaaaatacaaaattagcctggtgtggtggcacatccctgtaattccagctacttggggggctgaggcacaagaattgcttgaacgtgggaggcggaggttgcagtgagccaagatggcgccattgcactccagcctgggcaacaagagcgaaactccatctcaaaaaaaaaaaaaaatgcaaaatgtatgtgatgctcagattgtttcctaatatgtcaatcttgttggaacaaattaacaaattcttttttttcttttttttttttttttttttgagacggagtttcgctcttgttgcccaggctggagtacaatggcatgatctcagctaactgcaacctccacctcccaggttcaagtgattctcctgccttagcctcccaagtagctgggattacaggcgcctgccaccatgcctggctaattttttgtattttttgtagagacagggtttcaccatgttgaccaggctggtcttgaactcctgatctcaggtgatccacccacctcggcctcccaaaagtgctgggattacaggcatgagccactgcgcctggccgtttttgtcttcttatatgtgtccaaaagccacctcagaccctttggtttagaccaggtggggacatacgtcagttagcaatgaacagctcaaggctcaaggtggaaaagagtttaggaagcttgaagatgacctggtccaagcactcctaaggtgctcaaggcctctcttcagcctgccggccaagtgcccattggcctctgtattttttttttttttttttttgagacggagtttcgctctgtcactcacggtggagtgcagtggcacgatctcagctcactgcaacctccgtctcctgggttcaagcaattctgcctcagtctcccaagtagctgggattacaggagcccgccaccatgcctgcctaattttttgtattttagtagagatggggtttcactgtgttgcccaggctggtctcgaactcctgaactcaggcaatctgcccacctcggccccccaaagtgctgggattacaggtgtgagccaccacgtccagcggcctctgttcctaagacagggcccccatcacctgcccgggctacttgctgtgtctctgaacagcttggctgtcgctaagctctagcatgcagtgaaatctttctcctagaggccccagtcagcatgtcccattttagtctcttgggcatggaaaacacctcttaagcctgtattaatccagaacaacacagtcatcatcctgcttatcggcagcacatggagccagggtggggtggagtgggatgaggttggggaggttgtatcgcgcaatggttctgagccaggttccagacaagaggctcaaactccaggactacctcttactacctaagcggggtacttaacttcttggtgcctcattttgctcatttgtaagggccacattctagggttgctgcgaggcttccgtgagagaacgcaggtaaagtcccaaaattaatgctgtctgttacttacggttataaggcagggccctgaagcttctcaaaccttctgggcaagcaagggcatcttttcagagcttggagtttgctccagggtgagcagtttaaatgtgacttttataggaagtagatattttgaggagtagaatataaaattcacaggactatttaagatacaatcttaagactccaaagaactgttcagctggctacaccccatgagtacatatttattcatccttctctgctgttgggccacaagaaaccctattggtcaggtctgagaggccctgaagggacggatgctcagctgtaacttagggcgttccaaagagctcctgcccagcaatctcatgagagtgttctcgtttgctcttcttccctcctccccactaatttgagggtgctcaaaactgccacagggtagtcgaccactctacctttcctgtccaagaattcgatgccttggattgaaagaatgcttcaaatgatgtggtgtccctgggggaaaaagcagaaaaaagcaggggtcagcagctctgacctaccccttggaagcttttggactgaccgacccccttagctctaggggcggacaaagtctgtctgtgcccatcgtggtggctcacatctgtaatcccagtgctttgctggagtacagtggtgcaatctcggctcactgcaacctctgcctcctgggttcaagtgattctcctgcctcagcctcctgagtagctgggattacaggcatgcgccaccacacccagctaattttgtatttttagtagagacggggtttttccatgttggtcaggctggtctcgaactcccgacttcaggtgatctgcccaccttggccttccaaagtgctgggattacaggcgtaagccactgcgcccagctctgtgctcttattcttgccatgtctttctctttaggcacacaggatactgtcactttcttatgttttgcctcactgtgtaaactcaaagatcaaggcgtccctcagcaagtggcagaaatgtggagtttataggaacagtgagatggtggcttaaaatatatgaaaatagaaaagattgccagccacctggaactgtgaccatctgaaggatctccctgacagggccccagaggcaggcattaggtctgagatgactgggccttccttcccctttgtgtgggtcacgcccaccactcctgaagtacaatcctggttaaggttatggctcttgctatggtttgaatgagtcccccaaagtttatgtgttggaaactgaatccccaatgcaacagtgttgagagatgagacctttaagaggtgattaggtcacttgggctctgccttcatgaatggattaatttggttattgcaagagtgggttagttattgtggagtgggttcctgatacaaggatgaatccagcctctcttctctggagcatacgtgctctcttgtctttctgccttccatctatgaggatgcagcaagaaggccctctccagacacagaccctatgacctgggacttcccagcctccagaaccataagaggtaactctctgttttttgtaaatgatccaactcaggtgttctgtgatagcagcacaaaacagactaagacagctctgaaacctcacttcctgggtttgcaacctgtctccaccacttggctgctgtgtgatcttgggcagttgctgaacttctcagaacctcagtctctgcatttatacaatagggataatcatattgagctcctttgattgttaggagggttcaaacagagactgtatgttagcacatataaaaagtgtcctctaggtggccaggcacggtggctcatgcctgtaatcccagtactttgggagaccgaggtgggtggatcacgaggtcaggagttcgagaccaacctggccaacatggtgaaaccccatctctactaaaaatacaaaaattagctggcatgttggcacatgcctgtaatcccagctacttgggaagctgaggcaggagaatcgcttgaaaccggaaggtggaggttgtggtgagctgagatcacaccactgcattccagcctgggtgaaagagtgaaactcctggccgggtgcggtggctcacgtctgtaatcccagcactttgggaggcctaggcgggtggatcacaagttcaggagatcgagaccatcctggctaacacggtaaaaccccatctctactaaaaatacaaaaaaattagccaggtgtggcggcgggtgcctgtagtctcagctacttaggaggctgaggcccaggctactcgggaggctgaggcaggagaatggcgtgaacctgggaggtggagctcgtagtaaggggagatcgcaccactgcactccagcctgggtgacagagtgagactccatctcaaaaaaaaaaagagtgaaagtttgtctcaaaaagaaaataaaagaaaaatgtgttctctaaatattatttttacctcctaaaggaggaagagaaaggatcttgctgtgtcagcctctattattagtgtcccttctagagggcagtaaggggatagtgttactatcccctcccaatgcccaattcccaggcgctaggtggcccctgaatcagggcagaaggaaaacatgaaggaaggaataggggtccttaccctttcaaaaggtggccaggcttctctcagacccctcccttcaccccagcagccacaggtggaggggactctgggttggcagcttgcaagagaaacaaaggtctcttgttacctgcttctaggtgctgagatgcctgagccacaagggaacccaggatctgcctccctttggtttccaggtttcctataagaccctggagggacggcccagaaagagcagagttgatcccttcccccatccctcccttgccccttggactgtccacttgtctgcccacataatcccgtagttcctgctcatgagcacaatatgaccccctctgggaaggaactaggacggtggtgctcagcctaggttgcctatgagaacccccagggaggcttgaaaaaccccattgctcagccccgaaatcctgagattctgatctgactgttctggggtcgggggagggcattggtgagtccagtccctaccctcccaccccaaccaggtgattctgctgtgcagccaggctggagagcctgacggaggagctgcgggacagggcagagttgagacgggtgggggacaggggtagagctgtaaaggagatgatggggaacccccaagttcagttttgctgccctgaactacccaccctcagggaggcctggtgtgactttagagtatccctggtgctcagccacttctcccagccccgctcctactgatccttccagcccctccctctcaggaatccaagtgcctgggacacctgggagggcgtaggaaggggaccagcctgcacatgcccttctgggaggttttaccagcctgaggaggtatacagaccatgtgctgcgtttttcagaaagctaattttactcacaacttagatcatattctcttttttatttttatttttattttttttaagatggagtctcgctctgtcaccaggctggagtagtacagtggtgcatcttggctcactgcaacctccacctcctgggttcaagcgattctcctgcctcagcttcccaagtagctgggactacaggcgcatgccaccatgcccagctaagttttgtatttttagtagagacgagtttcaccatgttggccacgatggtcttgatctcttgaccttgtgatccacccgcc[132 bp omitted]ctacagccttgacctcctgggctcaagcgatcctcccatctcagtcccccaagtagctgtggcttacaggcatgtgtcaccatgcctggctattttttttttttttggtatttttagtagaaacggggttttgccatgtttcaaactcctgggctcaagcaatctgcctgcctcagcctcccaaagtgctaggattataggcacgagccaccatgcccggccttcatattcttaatacttagccctaaaatgttctctttttaaaaacataacgttgacaatggatagtaactggcagccctatgttgattctcactctcctattaaacaacaacaacaacttttaatagaaatgcccatgtggggacccactgatccagattctgccatgaggaaatgcccagactgggctccactctaatctgcactaaagagccctctccttgggctctgtagaccctgtcccagatgcccatcttcctggactgtcccctgtagccaggcatgtccatttgcagtcccaagctggggaagctcatgtggcctgccggctctgcccagaatgccgtccacctcccactctctcccagactaaatatccacctcccacagcaaggctgagtcctgacctgccccgcattggggtttaagctacagtgcaaatacagagaaacagcaggaaagggccaggtgcttgagtcatactacattttgaaaagaggaaagatcttttttttaaaaaagcattgttgcattataatagaagtatagtaaacttcatacttaaagtctattagataccctgaaacaattttaatttgtgttttttaaaaaatgtattactcggggctggg[138 bp omitted]ggtggcgggcacctgtagacccagctactcgggaggctgaggtaggagaatggcatgaacccgggagacagagcttgcagtgagccgagatggggccactgcactccagcctgggcgacagagggagactctgtcccaaaaaaaaaaagaagataatgtattacttgggaggctgaggtgggagaatcattttagctcaggaggtggaggttacagtgagccaagatagacccactgtactgcaagcctgggtgacagagtgagactgtccccaaaagattatttttataagaaaaggaattcatttcttacagttatggaggctgggaagtccaaggtcgaggaaccacatttggtgaaggccttttttttttttttttcttttctgctccttgtggagcagggctaccccataggcagtggtccagggcagccagagggccttggtgttggtggggcaggacgtcacatgcagagtggggctgagttgctagatcaggtctcttcctttttgtaaaattatttttaattggcacatacttgcacatatgtatagggtacagtgtgatatttcttttttttttttttgagatggagtctcgctctgtcaccaggctggagtgcagtggcgcgatcttggctcactgcaagctccacctcccaggttcacgccattctcctgcctcagcctcccgagtagctgggactacaggtgcccgccaccacgcccagctaattttttgtattttttagtagagacggggtttcaccgtgttagccaggtgaaagccaggtcaggaggatctcctgacctcgtgatccgcctgcctcggcctcccaaaatgctgagactacaggcgtgagccaccgcgcccggccacagtgtgatatttcaatacgtgtatgtaatgtgtaataatcaaaccagctaattagcatatccatcacctcgaacttttttttttttttctggagacaggaccttgctgtattgcccaggctggagtgcagtggcgcgatcacagctcactgcagcctcgacctcccagactcaagggatcttcttggtcagctcccggaatagatagatggaagcacaggcatgcaccaccatccccggataagttttgtatttttggtagagacgaggtttcgccatgttgcccaggcttatatcaaacatgtattatttctttgcattgagatactttgtgttttaaacatctttacataaaagtgacaaggattccttttcttttgagacagggtctctctctgtcaaccaggctggaatgcagtagtgcaatcacagctcacagcctcgaattcctggcctcaagctatcctcccacctccgcctcccagagtgctgggactacaggcgttaagtcaccgtggcggggcaagcaccctttgttctaagagtgctggactcctgatcactggcaagctgtttcacattgttctgcaacttttggtgtatcctttgacagcatctgtggagaccagatacttattttgttttcatcccgttagccccccagcaaggttggtagggggtgcgcagatggaaaagctccaggaagggaaaggctggggctggaggcctctccctgaggctgccgggcccttccctcctcccaaacccagacttcgcacggcttggtccgcctttcttaagctaagcgaaatcgttttgcggcttcttcagtcaccggaaccaccacctgctagaggccggctcccaggttctcctcgtgggacacccaggaaagtgcctagggaggaggagggagtggagcgcaggacgcggcgcggggaggagaacgcggatggagccaggagtcacccctctttccctcgggcgcccgcctcttcgcggatcgcgcccgcactgggcttatccagacacggcgagcggaagccggggagaagggagcgggcgcggggcggacagagaccgcagcgggcgggaaaggcgactggccgcggcccgacggagggtccccgcgaagttggaaaccggagacttgggcccctgcccaaaaagcagaatctgacgttaccgagggagagttcccgacaaaaaaggaagtttttatctgcttcggggacccagccagatttcgacaatagaaagtgtacttatcaggccggggaggacttcaccaacaaggggcaccggggcgggtcgccagtgcacaggggcgaggtcttccttggacccaggcaaaggccgcggggtccgggcagcgcgaggtcaaggctgggagagggttctggcgacaaagggccgcggccgagtcctcgctgagagctgccccagaggggtccacgcggaggttgggctgagggctgcgggccgccggggagccctgggctggggaccctccccgcgccctggtcgcccctgcgccctcccgctctgcgctcggcagcccctacctggctccggccgctggccccgggtaccgctgcaccgccgagaagtacagggcaaagaggagccccgagcaggcagccgtgagcaggagcagcagccagaagaacgacccgcgcgggagccccatacagccccggcccgcgagcgccccgtccgctgacgtcccaggcagaagggagagaaccgggtgggccgggtggcacttgcggaggcggccgtcttgccctgccccgccctgcccgccgggtgcctgcggcgcctgcccgcccggcagctccctctcggccccggctgagtggccagaggctgccgcaccctcgggagctgggcggcgggtcccccggggctggagtgtcgtcccggcgcccagagcgcgcgctcctttggccctgccccctgcccgggggacttcggcagcggccactcctgccactgcgctctctccagagcccagccccgggaggccgccagtctcgggttgggcagggcgctttcctcgcgccgtccggggctagctaggcgcgggtagacgccgccacctgctgcgctggctgcgctctgccctctgcgggcccggcactcggcctctagactctgtggcgggtgggcggcggccgggaggagatgtgcccggctccctccaaaggaccctcagatctgtcagtctgcggacgccaggacagctgggagggggcgggcagggtggaggagcaaaacccgacagctcagtctctgggctggcggtagaggggggaaaagggggtgaggtggggagcttgccgtgatgggtttcgtgggggagctaaggctgtcagcgcttatttggtaaccatccagggtggccagtcccctcaatcgcattgagttcctttcacagaacgaggccagtcagagagaccacctgaaatgttcagcacaacgggttcccaaacttattggcaccagggactggtttcctggaagacaatttttccacggaggggggtgggggtgggggggttggggatgaaactgttccacctcagatcatcaggcatgagttaagatgctctcataaggagcccgcaacctagatccctggcatgcgcatttcacaaaagggttcgcactcctttgagactctaatgccgaggctgatctgaaggaggcggagctcaggcggtaatgctccttccccctccactcacctcctgctgcgatgccctgttcctaacaggtctcggaccaggcttgggattggggacccctggtctagcaggctccagcatcagaaagggctgggaagctcagcacccgtgctctctaagtggaacactccctggcagtgagtgatggatgagatgggtgtgcttcagtggccactgttcggcaagctgtgacatgcggcaggctgtgacatgccccagactcccaactgtcagcaggctgcaaggatgagagggacctaggctaccgtgtcacgggcctttggctctaatctgttcttcatgtatccgaggaagtctgggtgcagcaacaggtacctgtctgattgcaaggcttcccgaaaacctcccagggcctgggcctgtggtcaggaatggccattcagtccatccagtctcagtactcctaccaagtcagggtcactggaggtcactcacattgggccagttctttccttcaccccaagactgctcagcagagccagactcatcttgctaccccgcagatgggcactacttggaatttatggtgtcacgactttcatttcaatctttatgggtttacttgtcaaaattcctgtagatgttacttatcccctgatcactggcttctcacatttcctcagaccttctctctgtgcccataaatatccctcctagcccttgctctcagtaagtgccttaccctctacttcatggagaaaaggagaatcattcattagtaatttattcaacttccacttacaaacctacaaacttggcccccacacacagcccagcctctccctgccgggactctagtctttttttttttttttttttttgaaacagcctgttacccaggctggagtgcagaggcgtgatctcggctcactgcaacttccacctcccaggttcaagcgattctcctgcctcagcctccccagtagctgggattacaggagtgcacccccatgcccagctttttttttttgtatttttagtagggatgggggctttaccacgttggccaggctggtctcaaactcctgacctcaggtgatctgcccaccttggcctcccaaactgctgggattacatgtgcgagccactgcgccaggcctcaggactccagtcttaagagctggggagagggtgctctcctcctgtgtgggagttaaccccctatctgtgttaataatccaggtccacctccaatgccttaaatggcagtactcccctcacaccaagatctcctatccacccacctggagttctccttcctcccatcttcagcctcacaggacctccagggtctccatccttcccttttctcccagtgggccaaccctctctcagcagctttctttcctatctaggcaggactccctgggttataatctgagctactcctgcatcagtaacccagattctcttgtgttcctggctttcttcccagcaaaactctgacctggattcactcttgcctctgcctctcctgtgctgcctgtccctggcctggctgagtgctgcaggggtcaggggtcaggtgtagctcattccagagtgtgaattgggaacacaagtttggcctcagctggctctcaacatcagccatttccttatccttgctcagctccagcttctatcctgctcaacaatgattctagaacttacttctttcctcaagcctcctcttttcccagccatacctgtgagaaaatgcagcccatcaggagtgaccttcaacttcccatgcccccaagttcaaagtcatcttttgttaagaactgtgcagattttgctctccttacaagctaaccaatgaaactgccatagttctgtggatgctggtagaagacacaagactactggatcagagacaaaggactttattactcatggtgcagcaagcaacataggcatcatgtttgtgtcacttctctttactcctcaagccccatgagagtgatacagagaggcccaggtgagtgttgcacacacaatgggtttgcagcacagctgagaatccctgagataaggaaaccagaatcttttataatgggctgcaagcaaacctgctcttgtccaagagggagacattatctttattacgttggatagtgaggaaatctgccctctgctccagagggaggcactatctttatcttccaaggcagtctgctgtaccaacaatctttttttttttttttcttttttagacagagtctcgctctgtcgccaggctggggtgcagtggcacgatctcggctcactgcaagctccacctcccgggttcacgccattctcctgcctcagcctcccaagtagctgggactacaggcgcccgccaccacatctggctaattttttgtatttttagtagagatggg[145 bp omitted]agttggtccctctgctcacagcatgatcctgcccatgcaccctcaccttattgctccagactctcctccttccagggagagccagcctcttcactgtgacctcccattcttcagctcttgcttcagcagccctccctgccccctctgcaaggtccttatcacagcctatgaacatgccccaaatagctcatcctaaaaagcaaagcaaagcaaaacaaacaaaaaacgccatggagctggcccccttcatagctactctctttttctttcatccaagttcttggtagagagtctattctgtctctgcttctttttgcatctgacttccttacctacgatgccattgaaattgtacccactgaagtcactagcaaccatcatccttccaaagggagtccacattttccagttctaattctgctgcatctgtctctctgaatttgacacttagctcccagtaattccagcctgcaactctttgttctcatggtttcaacaaccagctttctgtttgtgactcctgaattagtctccatctgaggcccagatctctatcagctgcaaacctgttcagctgtgtataaaggcatccctggagacctgcgttacttttttctttctttcttactgtttttttttctttcttactgttttttttttttttttttttttgagtcagagtctcactcttgttgttcagactgtagtacagtggtgaaatcatggctcctgcagtctttttctttttttttgagacggagtctcactctgttgtccaagctggagtgcagtggcatgatcttggctcactgcaacctccacctcctgagttcaagctgccttgattctcctgcctcagcctcccaagtagctaggaccacaggcgtgtgctaccatgcccagctaagtttttgtatttttagtagagatgggatttcacca[138 bp omitted]tgccttagcctcccaagtagccaggtctataggcatgtgccactatacccatctaatttatttttgttttaatttttgcagagacagggtcttgcagacacagagggcctacttctcatgggtttttcagggctaactatgggacttgagtatgtgtggatttggtttggttatacgggcagtcctggaaccaatcccccatggataataagggatgactgtatgtaaatacaattatataatatataattataaaattatactttttataattacagaatttcctttaccagagttgtttttttttttttttgtctcatgtgtatttgaatcttgtttcagcctgaagattcctttagtatttcttgtaatgtgtgtctgctagcaataaatcctcttactttctgtttacttagaagtgtctaggcacctgccaccacacctggctaatttttgtatttttagtagagacagggtttcaccacgttgaccaggctggagtccactttcactagaaagtggggctatagagttcctcatgctggcagttcatcttttgcaattttttttttaaacagtctcactgtattgcccaggctggagtgcagtggcgcaatctcagctcactgcaacctccacctcccgggctcaaacgattctcctgcctcagcctccagagtagctgggattacaggcacctgccaccacacccggctaatttttgtatttttagtagagatagggtttcaccgtgttggccaggctggtctcgaactcctgacttcaagtgatccacttgcctcggcctcccaaagtgttgggattacaggcgtgaaccaccgcgcccggccgcaatggtttttaatttaatgttgacttcctcattgatttgtcatcttaaaattctattttttgaatcaggaaaattgatctggatgtttgataaatctaaggaattgttaaattttaaaatgtgtggctaggtgcggtggctcacactgtaatccagcactttgggaggctgaggcaagatgatatcttgagcccaggagtttgagaccagccagggcaacctagtgagactccatctctatttttaaaaagaaagaggtcaggtgcagtggttcacacctgtcatcccagcactttgggaggccaaggcgggcagatcacctgaagtcaggagtttgagaccagcctggccaatatggcaaaaccctgtctctactaaaaatacaaaatttagtctggggtgggtggcgggcacctgtaatcccagctactcaggaggctgagacgggagaatcgcttgaacccaggaggcagaagttgcagtgagccaagatcacgccactgcactccagcctgtgagacagaatgagactccgtctcaaaagaaaagaaagaaagaaaatgtgtgatagtagcattgtggttattttttaaaagtgtccttattgttaataatacatactgaatatttacaaacgaatatgatacatggaattctttaaaaataaccaagtctgggccggaagtggagagtggatggggacacagatgaaacaaattggctatgagtgtggctcattgttggggctgtataatggggatatgagggtgcattacagtattctctctacttttgtatatattcgaaattttccctaacaaaaacctaaatttttctttttagctgaaatatgcttcattagatatttcaaaactataaggttatccttaacttcaatcaaagtctttaaaagtatatatacatgcttttcacataagatgaactatggattacggatttgcaaaaccaagagatcaaaacttcgagtactctatgttctaaaacaaccacatgtaagcattttgtaaaaacatatttttactaaaatcaatttatttctcagtatctgaaactggcatgaatgtcgagcaagttcctaatcaaaatgtattagatgttctaattatgtgtcagaggctgtttttgtcatttcaatcaaaaccatttttagatgattgattattttatgaaaaaaagcaatgatgaaaattgttgcagttgtatttcaagagtttataaaaagacaaatttatgcattgaattgaagctgagtagaaaccgagtttggaaaaagaaaatacagttgatggcttaaatttgaatatgaaccggatattctagatcagtcagaaaatggattattagcacttgagattcacgaaattagagcctactgcttttcagggtttaagaagtttcttttttatttttttttataaactcattaatgggaagactttttttttaacttcttgaaaatgtcaacattttgaaaaaaatgttattttatcataaatgagaaactaattttttttttgagaccgagtttcccttttgttgcccaggctggagtgcagtggcgcgatcttggctgactgcaacctccacttcctgggttcaagcgactctactgccccagcctcccaagtagctgggattacaggtgcacgccaccaccctcagctatttttgtatttttagtagagatggggtttcaccatgttggccagtctggtctcaaactcacaacctcagttgatccacctgccttggcctcccaaagtgctgggattacaggtgtgagccactgtgcccggccaaaccatttttgtttaatttcatttctacatggtcgtcaaacgtgcctatccaatgaagccttcatagaaggcccaagaagacagagtttggggagcttctggatagcggagcatgtggaggttccaggagggcagggtgcccaggaagggcatggaagctccgtgtcccttccccataccttgccctatgcatttcttcatctgtatctattgtgatatcctttacaattaaactggtaaacataagtgtttcctgcctctgtgagccactctagcaatttaattgaacttgaggagtgagtcatgggaacccaaatttatagctggttagtcagtagcacaggtaatacaacccctgggggttgtgatgggaattggaagtgggagggagcagtcttgtgggactgagccctcaacccgtgatctgatgctgtctccaggcagatggtctcagaagtgaactgaattagaggacacccagctggtgtccgctgcagaattgattgcttgcttgttggtggggagagatctgcacacatctggtcacagaagtcttctgtgttgattgttgttgagtgagagcagaggaaaaatgcgtgtaggaaatgcgcacgaaggaaatgtgcacgtgtgggagggtggggcagggccgggagccggatcctcatcttccctgggagacatcagtagataatctaaaacataattgtcaacgcacacatgtaatttcgaagtatggaggtaaatgccaaaggctcagctggaagatttgaaagtggctgactctgcatagatgaaatagcaggagagtagctggggactaccaattttgaaaaacaatattctctcagggaattcacaagttgaattttatcctcaggcccagcatctagaaaataagcccaagctctgatgcctctcattcagggctcccaatgagctggacctcgcctgctgctctagtaagattcctgcgttatattttctgcaacagcatcacctactgtcttgtaggccccacacgtgcatgttgctgtctcgccccattcttgttcctgcattcctctttgcctggcttgctgtttcttccctccaccctccacctgccccaccatcacctttttctcctgccttcctgtggattattttgcttttagcattctgtttttgtttcttgtttgtttgttttttgagacagagtctcactctgtcacccaggctggtgtgcagtggcatgatctcagctcactgcaacctctgcctcctgggttcaagcgattctcccacctcaaccttccgagtagctgggattacaggtgcgcatcaccacacccggataatttttgtatttttagtagagatggggtttcaccacgttggccaggctggtctcaaactcttggcctcaagtgatccaccgccttggcctcctaaagttctgggattacaggcgtgagccaccgtgcccggctccattgttttctttattccccatgttccatgttttcttcttttatcatttccttcttgtttgaagagcttcctttagttattctttcagggcagttcttctggggacaattctcttagttttcttcatcttgtctggacgctactgctttccttgggtcagtctatcttcgtggcaataccacattgccttaattactttagctacgtaaacatctagatatgtgtgatgtaagccctctagctttgtgggatttcttcagtattgccttggctattcttggccttttgcatttccaaatgttttagaatcagcttgttatttctacaagaatcctcttgggatttggttgggatcacattataggttaatgtgagtaaatgggatatccagaaacattatatatagttccatgtatttgggttaatttctcaataatatttcatagttttcagtatgcaattgtgctcatttttccgtaaatgtatacctaggcgtttggtccttttttttttcaacttaaacatactttatttactgattaagaacttattgtacagaaaatgtcttatgtggttgatcttagctttgttcatgctgacttcagggggtctggttctctatgctcaagattgttcgattggccggg[138 bp omitted]gttggcgggtgcctgtagtcccagctactcgggaggctgaggcaggagaatggtgtgaacccaggaggcggagcttgcagtgagcggagatcgagccactgcactccagcctgggcgactgagggagactctgtctcaaaaaaaaaaaaaaaaagattgttcgattgccgctgttgctgttggtttcttttctttcaggctcaaggtgagtactttcatagatcttagttttcattccttctctggcaattctttcctggattctttgctttgcataattatacctccagtgaaaccagcatcccaaagtcaccaagataaatccccctactccaacgtcacatgatcttctaattctaccttcctctgcgcgcggctcgccgggctccaaccggggaggccatgggaacgattccgagcctgcacccgccctctgtttggtgctttttgatgttattgtaaacaaccttgtttttaaaatttcatttctttattttttcattgctgacatatagaaatgcaatggtttgtttaattacctgtgtatt[220 bp omitted]gaggcaggagaattgcttgaaccagggaggtggaggttgcagtgagccaagattgcgccactgcactccagcctgagtaacagagcgagactccacctcaaaacaaaaaaattatttatttatttattttttagtgatggagtcttgctctgttgttctgtaggctggaatgcaagggtacaaccacagctcactgtagcctcaacctcccaggctcaagtgatcctcccacctcagcctcccaaggagtagctgggaccacaggcacacaccaccatgcctggctaatttttatggatttttagtagagacagggtttcgccatgttggccgggctggtctcgaactcctgggctcaagcgatccacctgcctcggcttcccaaagtactgggattataggcatgagctacagtgcctagcctagtgtttaatgagtacaaagtttctgttatccatgatgaaagagttctggagatggacagtggtgaccgttgcacaacattatgatgtttgcaattgttgaatacatagagggaagggtccctctcctgccagggaagctgaaggacagatggccctctccctgctcatggcagccagaacacaagcacagggcagagtccgccacctgggtgctcctgggactttgaatattgagagattgatacagagatgcagagataaaacagagtttctttttgtcgttgttgttgagacggagtctcgctctgtcacccaggctggagtgcactggcacgatctcggctcactgcaagctccgcctcccgggttcacgccattctcctgcctcagcctcccaagtagctgggactacaggcgcccaccac[187 bp omitted]gagtccactgggctggtggcagatccctggtggcagcaatacaatggcgttgtcccaaatggacagttccagcagcaagatcttggatgtagtctcactgcctggtcacatgaccacttatttgaagtcaactttataccttatgaaagcactcagaactggattaagaaacagaggacgtaactgagactttatgtgtgtgtaggcgtgggtgtgtggtgagggcagtgccacccagtgacctccagctggtactctgaaactgtgcatgcctccccagcctccaatctactctggctgagtcctcttgggaaactcccagaggctgcactttcccccagaatgcaagaccaggcaagctctcctttttgctgctggtccctagtgacaatctctcacctcagcaccaaaacaaagcaagtcctcacctgctcctttccccagggagccctggatctcagatgtacttgccaagtcctgtgtgattgcctccctggctgctgtcttacttcagagaggcagttgtggggacagacagagtcagggacatctgctccagccactgttccccgagaatcccgtagctgggttcccttggaataaaaaaaggaagtggggaggaatgccaaggaagaggacacttcgaacatctctgagcttcacacactccaaacggcagtagagcacttaagagaggggactccaaagcccaacaatctcagctctatttgttaaccgtgtgaacccaggggaaattacttagactctctatgcgtcagtttcctcatctatagcacagaaatgatgatagtaccaacttcaagaggattgctgtgctcattaaatgtgcttgcaacagttctggaaacaggaagcactatacaaacgttggctgatacagtcctgaacagactgaaaagtgatgtgttggggacagacctaggccttgagaaagactgggctctttgtggaggaagaactacactgccaggcattggacaggggaagagctggactctgcctgcaaatctggtgtcaccagatgtgttggattgctgacaaagatggcattgaatgcacagccctttgcaatgtgactttgtcactcctcctaacaagaggctgagtctgtttacccacctgcagaatgtcggcagctgcatgggtaaccccaagccagagcagaaggaagctgatcccagcacaaattgctgatctgtaaaatcataagcaaatacatggtcattcttttaaaccttcagattttggaagacttggagggcagcttcacaggtagtgaagttgttcttgggccctgtctttagggtagagctgctgcttacacctggggagccccaggagtggtgacattttcttcctgggctccaacaggtgcctcatgatgtgctgtttgttcatcccttacccacaaagatggaagctgttatttcttatatcacttctctgttttgttttttttttttgttttttgttttttctgaagcaagctcttactctgtcgcccaggctggagtgcagcggtgccatcccagctcactgacctcccaggctcaatcatccacctgcctcagcctcctgagtagctgggactaaggtatgcaccactacactcagctagttttttgtatttttttgtgcagatagggtttcgccatgttgcccaggctggtctcaaactcctgggctcaagcgatctgtctgcctcagacacccaaagagattacaggcatgagctcccgtgcctggccatcacatacttcttgaaaaactctagatgctggacctggttgctgggcaaatacaaagctgtaagcaggttaaaagagaatggctaatttgggaggactgcacaaccagaggaagggagaccaaaggaaaggagacacccagaactgtctcctactgaaggagaatgaggaaagga[136 bp omitted]atggtgaaaactcgtctgtactaaaaatacaaaaattagttgggtgtggtggtgcgcaccgtaatcctagctactcaggagtgtgaggcaggagaatcacttgaacccgggaggcagaggttgcagtgagctgagatcgcaccattgcactccagcctgggtgacagagcaagattctatctcaataataataataataataataataataagcatccttgggccgggtgcggtggctcatgcctgtaatcccagcactttgggaggccaaggtgggcggatcacctgaggtcaggagttcaagaccagcctgaccaacatggcgaaaccccttctctactaaaaatataaaaattagctgggcatggtggcagacacctataatcccagctacttgggagactgaggcaggagaatcgcttgaacccgggaggtggaggttgcagtgagctgagattggcccaatgtactctagcctgggtgacaagagggaaatttcatttcaaaaaaaaaaaaaaaaaggaagtgttgcaagcttccaagggcaaacgcatttccgtagaagggaaagagaattaacctaacattggactctctcttgtttctaacatgagaagctggagaacaatttggcaagaggacaagtttcttgtgagacgcgtgggtatatttatacattcacaaatgcccccagccagaagtgatgtgtgtctccacgcccagctaagcactgtgatgaatgattctgctctggttgtctaaatggtgtctgcctaagtgagaaacctacctattcccttggcccaaacccctttcttgccaagcctctcttctgtacccaaattgtatcgcctgacatggtcctgatttcactagcccctgactctgagacaatgatactcattgctgttttctaatacccccgaagcaacgagcaaggttagacgagtccgatgaatctgtaagagaggaattctccacccatgcctggggttggctgtgtcaagagtttgtctttcatctcctcctacgctcaggagtgctgtgtctgtgcaaaatggcagggcgtgcagaccctgtttcttcctgccctcgcgctcagctaagggtagacaccatatcgtgcatcaccttgggtgtgctatttgccttgagtttttttttaggtggggctggggggacagggtcttactctgtcacccagcttggagtacagtggcgccgtgatcatggctcactgcagtcttgaactcctgggctcaagctatccttccacctcagcctcctgagtagctaggactatagatgcgcaccaccacacctggctaatttttgtacttttagtagagatggggttttgccatgttgcccagactggtcttgaactcctgagctcaaggaatccgtttgccttggcctcccaaaatactaggatacaggcataagccaccacacccaacctgccttgagattctgaggaagctggtgtgtgcgtgagtgtgtgtgtgtgagtgtgtgtgtgtgtttgtgtatgtgaagggggtcggggtcaggcctctagttccctgttccccagtgccaacacagaactattctttgtgcccacccagtatgtgataatccagaaaatgccacatttttgtataaaccgatttgcaaacaattttgtagataagtataaatcctcaagcttggtacagtgtacttttctccttctgtgaacacaatgtttgactttaagctttcctttaaataccagtcaaagcagggaatagtgacttatgcctgtaatcccagtactttgggaggccgaggtgggccgatcgcttgagcccaagagttcgagacaagcctaggcgacatcgtgagaccctgtctctaccaaaaagagagaaaaaaagttaactgggtgtggtggcacatatgcaggaagctaaggtgggaggatcgtttgagcctgggagttcaaggctgcagagagctgcaatagcgccactgcactccagcctgggtgatggggtgagaccctctctcaaaaataaatacatacagtcaacaggacatgtgaggactgccatggagaccagcatgaatgcaacactatcctctgagtacactttagactttccattactatcaccagaaaggggtcccaatccagaccccaagagagggttctgggatctcatgcaataaagaatttagggtgagtccagagtaaagtgaaagcaagtttgttagagaagtaaagaaacaaaagaatagctattccataggcagagcagccccaagagctgctgggtggctattttttttatttatttttatttttagtagagatggggtttcatggtgttagcctggatggtctcaatctcctgaccttgtgatccacccgcctccgcctcccagtgggtggctatttttatggttatctcttgatcatatgctaaacgaggagtggattattatgttttccaggaaacgggtggggattttttggaaatgaggtttcctcccccttttagaccatataaggtaacttctgaacgttgccatggcatttctaagctttcatggtgccggtgggagtgactttagcatgctaatgcattataattagcatataatgggcagtgaggactattagaggttacatttgttgccatcttggttttggctggcttctttactgcatcctgttttatcagcagggtctttgtgacctgtatcttgcgagctcctatctcaccctatgactaagaatgtctaaccccctaggaatgcagtacagcaggtctcaacctcattttacccagtccctattcaagatggagtcactctggttgaagtgcctgtaacattactaacacaaatatctgtcctgcttctgaatctctcttgatctctccaatgcaccctcgacccaggagcaacttttggaccctttgcctactcctcactgcaaaaaagaacaagatcaaaaactgctgatcctaggctgggcatggtggctcacacctgtaatcccagcattttgggaggccaaggcaggcggaccgcctgaggtcgagagtttgagaccagcctggccaacatggcgaaatcccgtctctactaaaaatacaaaaattagccaggtgtggtggcaggcacctgtaatcccagctactcgggaggctgaggcaggagaatcacttgtacctgggaggcagaggttgcagtgagcccagatcgtgccattacattccagccttggcgagagaacaagactttgtctcaaaaaaaaaacaaaaaacccaaaaaaactgctgacccagaagcagagaattgcgagacgtgttagatctgtactttaaccttttaaatcctctaaaacagctgaattagttgtctaagtcccaggcatgtgagaaaagaggaaaaataatgttaaatccgtgagtaactgtgtgagcccttgcaccagtgactctgaaaggcggaagagaaagagagactggggttgttgaaagataaattatgctgcaacgtttaatggataagccatggtttacccaccggtaaaacactcaattcctggcccaggctttgaatcattgcaagggcactccttgggaagaggacatagttggaggctgttagtctgtttttacattgctataaatacctgacagtggataatttataaagaaaagaggtttaattggctcattgttctgcaggctgtacaggaagcatggtgcccacatctgcttggcttctggtgaggcctcagggagctcttattcatggcggaaggtgaagtgggagcaggcatgtcacttggagagagagcaatagagagaagggagaggtcccagactcttaaacaaccagaccttgcatgaactaactgagcaaaactcacttatcaccaaggggatgttgctgagccattcatgaaggatctaccccatgatcgaatcaccccccatcaggccccacatctaacattaggaatcatgtttcaacatgaggtttggaggggacacacatccaaaccatatcagaggccgtagagtttggaagcctgaacttgcacttggggtttttggtctaagctggaaggagtcaagaaaaaggatggggctgggcgcggtgactcacacctgtaatcccagcactttgggaggctgaggtgggcagatcacttgaggtcaggagttcaagaccagcctggttaagatggtggaactccgtctctactaaaaatacaaaaattagccaggcgtggtggtgcacacctgtgatcccagctactcaggaggctgaggcaggagaattgcttgaacacaggaggcagaggttgcagcgagccaagatcacactattgcactccagcctgggtggcaagagcaagactccatctcaaaaaaaaaaaaaaaaaaaaagagagacagagatgggaactatgattttttaaataattttttttttactttttttttttttttgagacggagtctctgctcactacaacctttgcttcccaggctcaagaaattctcccgcctc[134 bp omitted]tggcatcccaaagtgctgggattacatgtgtgagccactgtgccccacctaattttttttttttttaaataatagagaaggggttttgccatattgcccaggctggtctcaagcaatcctcccacctcagcctcccaaaatgttgggattacaggtgtgagcctccatacctggccagagtgggagctatgtttttttttttttttttttttttttgaaatggagtctcactatatcacccaggctggagtatgtagtggcactatctcggttcactgcaatctctgcctcccaggttcaagtgattctcttgcctcagcctcccaagtagctgggattataggtgcctgccaccaagctcggctaattctttgtatttttagaagagacaggtttcgttatgttggccaggctggtctcaaactcctaacctcaggtgatctgcccccttctgtctcccaaagtgctgggattccaggcgtgagccaccgcatctggccagagtgggagctatactttatggcagcctcttttattgaacagattatatgttcctgtccacattttatttcaaatttataagagaactaggcttctaagaaagtcagttctaaatgtatttctggtagagttttcatagcaagaaagagagactagatggccaggcgtggtggctcacacctgtagtcccagcactttgggaggctgaggcaggcagatcatgaggtcaggagaccaagaccatcctggctaacacggtgaaaccccgtctctactaaaaacacaaaaaattagttgggcgtggtggg[203 bp omitted]tcggctgtttcagggttgggcttattcccagaattagaggcaactgtgtgagttaaaaccacctagaaaggccttcgtattaggtgtcctctcccagaagtagagcctgagccaggaatttggggcatgtggtttactgagggagggctcatcaggaagcatctataagggagagaagaaaaggataatcgagtgaagtctcaggtaaaggcttggcttgacctgccaagatctcaagcatagatcccaacacagaattgtcctgtccccttttgtaccccttaagtgagacatcaactccccaggagtggggatggggtggaatgtcccaagcacgtcagggtgacaggctctccaggagcctccagagaaggtcacaggtgtcagccattagcctgggtagtgttttgctggctgataaagggcatttgggtgggtccctggcaatagtctgttattcacataagccagagttctgcttttgagagtgtatcaggaaattatggaactatggtattagaaatgctaactacagagatgtcatctttttttgaggctgaagacaatgatccgtctcagaagcaggtgacttattcccccttcccccaatcttgtgtgtttctttggacagtgtcctagatggtagcattaattgcacctctgttatgccaccagctctatcttggtaagcttctgaagcacaagttaattaaatgagtgtagctgatgaatgctaaatgataatgtgttggttttttttcttcctgcctgacatgtaagataacctgttagacgtgtgtagtgatgtgtgatggggtgggaggattccattttttgcatctttattacagtgggtcttaggtactaaagcattttaaaagattctccttatttcccaagaagacagataagatgttggctgcatttttaggttgtgtaattcaggtgattgtttggtatattcacgttgtgaaactataactttcatgcacgtccgtgtgaagagaccaccaaacaggctttgggtgagcaacatggctgtttatttcacctgggtgcaggtgggctgagtccgaaaagagagtcagcgaagggagataagggtggggccattttataggatttgggtggataaaggaaaattacagtcaaagggggtttgttctctggtgggcagagtgggggtcacaaggtgctcagcaggggagcttttgagccagaatgagccaggagaaggaatttcacaagacaatgtcatcagttaaggcgggagcaggccattttcacttcttttgtggtggaatgtcatcagttgaggcaggaaccggccatctggatgtgtacgtgcaggtcacaggggatatgatggcttagcttcggctcagaggcctgacattcctgtcttcttatattaataagaaaaataaaatgaaatagtggtaaagtgttgggacggtgaaaatttttgggggtggtgtggagagataatgggtgatgtttctcagggctgcttcgagcgggattaggggcggcgtgggaacctagagtgggagagattaagctgaaggaagattttgtggtaaggggtgatactgtgggactattagaagaaacatttgtcatttagaattattggtgatggcctggatacggttttgtatgaattgaaaaactaaacggaataagagaaggagaaaaacaggtattaaaggtctaagaattgggaggacctaggacatctaattagagtacctaaggagattcagcatagccttgccagcaaagattatttatttacttcaagagttaagagtggcagtttggggatagcaccaggagatatcagctgtgatggcttggagaaatagtgtaaaccagcagtgtaaacaagagcagggaatgcatgagtagttgagaatggtgaataggagtatgactagacagaagatagtagggatgacaagttttttggggcacagtctaagttggtctggtgtctggaatgagactgggaccaaataaaaaggaacgtctatacaggagctcaaatgggctgtaccttgtagcattctgaggacaggtctgacttctgagaagggaaagtggtaaaagtattgtccagtcctttttaagttggtggctgagcttggtgaagtgtttttaaaagacctttagtccgttctacttttcctgaagacggaggaccgtaagggatataaaggtttcactgaatactaagagcctgagaaactgcttggctgatttgactaataagggctggtctgttatcagactgtatagaggtgggaaggctaaactgaggaattatgtctgacagaagggaagaaatgactgtgtggccttctcagaccctgtaggaaaggcctctacctatccagtgaaagtgtctacctagactaagaggtattttagtttttgtgactcggtgcatgttgagtaaagctaacttgccagtcctgggcgggggcaaatccttgagcttgatgtgtagggaagggagggggcctgaagaatccttgaggagtagcagaatagcagatggaacactgagaagttatttccttgaggatagatttccacaatggaaaggaaatgaggttctaagaggcgggctagtggcttgtactatagcatagcctgcttttgctgctgtgtggtgattaggcctgctggaactgccatcaataaatcaagcgtgatcagggtgagaaacaggaaagaaggaaatgtggggaaatgggaagaacatcaggtggatcagagagatacagtcatgggggtcaggtgtggtatcaggaataatgtgggaggccagattgaggtccgggccaggaacaatggtaattgtgggacttaacaaagagtgagtacagctgaaggagccagggagcagaaagtatatgcatcaggtatgaggaagaaaataattttggaagttatgagaaatgtagagagtgagttgagcatagtttgttatttttagggcctctaaaagtattaaagcagcggcagccgctgcacgcagacttgagggctaggctaaaacagtaaggtcaagttgtttggacagaaaggctacaaggtgcggtcctggctcttgtgtaagaattctgacctcactaaccatgcctaggaaggaaaggagttgttgttttgtaagggattgaggtttgggagattaatcagacatgatcagcagggagagcacgtgtgtttttatgagaattatgctgagacaggtaacagatgaggatgaaatttgggcttgactgaagtaatgggggctgtctgtgaagccttgcagcagtacagcccgggtaatttgctgagcctaatggatgtcagggtcagtccaagtgaaagcaaagagaggctgggatgacgggtgcaaaggaattgtaaagaaagcatgtttgagatccagaacagaataatggattgtggagggaggtattgaggataggagagtatatggtttggtaccatggggtggataggcaaaacaatttggttgataaggcatagatcctgaactaacttgtaaggcttgtctggttttaggataggtaaaatgggggaattgtaaggagagtttataggctttaaaaggccatgctgtagcaggcatgtgataacaggctttactcctttcaaagcatgctgtgggatgggatattggcattgagtggggtaagggtgattatgttttaatgagatggtaaggggtgcatgattggtcgccaaggagggagtagaggtatcttatacttgtgggttaaggtgggggggaatacaaaagaggaggacgcaaaggaggctttggattgggaagaagggcagcaatgagatgcggctgtggtccaggaatagtcagggaagcagataatttggttaaaatatctcggcctaataagggaactgggcaggtggggataactaaaaaggagtgcttaaaagagtattgtctaagttggcaccagagttggggagttttaaggggtttagaagcctggctgtcaatacccacaacagttatggaggcaagggaaacaggcccttgaaaagaaggtaatgtggagtgggtagcctccgtattgattaagaaggggacggacttaccttccactgtgagggttacctaaagctcggcatccgtgatggtctacggggcttccgaggctatcgggcaatgtcagtctttagctgctaagcagagaaggagtcagtcagagagccttgggccagagttccaggggctctgggagtggctgccaggtgagttgaacagtccgatttccagtggggtcccgcacagatgggacacggcttgggaggaatcctgggctgcaggcattcctcggcctggtggtcagatttcgggcacttgtagcaagctcctgggggaggaggttccggaggaatgcctggccgctgaggttcaggcgtttggaagttcttgtgtgctggagatgtggctggggtttgtctcacagtggaggcaaggaattgcaacttttttctattattgtacaccttgaaggcgaggttaattaaatcctgttgtggagtttgagggccggaatttaatttttggagttttatttaatatcgggagcagattgggtaataaaatgtatattgagcataagacggccttttgaccttttagggtctagggctgtaaagcgtctcagggttgctgccaaacgagccatgaactgggctgggtttttatatttgatgaaaaagagcctaaacgctatctgatttgggataaagaaaaaggagcattaaccttgactatgcctttagctccagccacctttttaagagtaaattgctgggcaggtgggggagggccagtcacggaacgaaactgtaagctggaccgggtgtgaggaggggaggtgataaaaggattatagggtggaggagcggaggctgaggaagaattgggacctagctcggcctggcgaggaggggagaggtcagatgggtctgtagaaaaggaagattagaaagactcagcgatgcttggggttgggactgaggggacaggcgggagggaaagaaggaagatttgggatgagttgcactgggcacagagactaggaagggaccgatgtgtaaaagaatgcctggacgtcaggcacctcagaccgtttgcctattttacgacaagaattatttagatcttgcaggatggaaaaattcaaagtgccattttctggctatttggaattactgtcgagtttgtattggggtcaagcggcattgcagaagaaaataaggcatttaggttttaggtcaggtgtgagttgaagaggttttaagttcttgaggacacaggcttagggagaagaaggagaaatggaaggtggaagcttgcccatagtgaaggaggcaagcccagagaaaagagagagtagagacacggagggaagaggttcgggggttcttaccctccagaaaagcgggaaaggggtcggggtgtggaaataagggattgggggttcttgccccatagaaaagcgggacttaccgctaagggtgaaggagaaggggttgaggggtacttgcccctccctcagaaaagcgggacttgccgctaagggtgaaggaccaaggcaggcgtccctgcgtggtctgacacctttgaaacatgggtgaataatcagagaggcgtccctgcaatgattaaacaccaagggaaggctaccttcccagtctgtgaccagcgctggagttttgggtccatggataaaacgtgtctcctttgtctccaccagaatatgaaaggaattgaaattgagagaagggagagattgaagtgtggcaccaagattgaaaggagcaagaggttgagagatagtgagggaagttggagaagagagtaaaaagaggccgcttaccggatttgaaattggtgagatgtttcttgggctggtcggtctgaggacctgaggtcataggtggatctttctcacacagcaaagagcaggaggatgggggattgatctcccaagggaggtcccccgatccgagtcacggcaccaaatttcatgcgcggccgtgtgaagaaaccaccaaacaggctgtgtgtgagcaacatggctgtttatttcacctgggtgcaggcgggctgagtccgaaaagagagtcagcaaagggagataagggtggggccgttttataggatttgggtggataaaggaaaattacagtcaaaggggtttgttctctggcgggcagagcggggtggggggaggcgggaaggtcacaaggtgctcagcaggggagcttttgagccaggatgagccaggagaaggaatttcacaagacaatgtcatcagttaaggcgggaacaggccattttcacttcttttgtggtggaacgtcatcagttaaggcaggaaccggccatctggatgtgtacgtgcaggtcacaggggatatgatggcttagcttcagctcagaggcctgacaataaccactatcttcttgctgtttattctcacagctccctgcccctccctaattgcatcacactgcatgcttagcttaattgtctgtcttcccttagactgtgagtgagtctatgaggacaggaactgtctgccttcctaatcaattttcagcaccttgcccagcctggcacatgacaggcactgaacagaaatttgttgaataaaggccctgagcagtggctcatgccagtaatcccagaactttgggaggctgtggaaggaggattgcttgagccaggagtttgagaccagcctggcaaacatactgacagcctccttatgctttattttaaaacattatccaggcatggtggcgtgcacctgtgatcccagctactcaggaggctgaggtgggagggtggctcgagcccaggagattgaggctgcagtgagctgtgatcacaccacttcactctgttatgggcgggtctttgttcttagagctcccaagatggggtggggctgctcccaagatggcagcaagccttttgttctctgacctggggtccttggcctcacagattccaaggacttgggccatacagtgagtgttgtagctctattagaagccgtgggtcatggaagagaactgtggcacccagtgactagtgttcagctcaattaggacgaacccgggacttagccatgcaggaacaatggcgagcctttagcccgattgggagcagcaacgggcacctcacttgatcagaaacacagcggacaccctgccagaagtcaatggtgggtctgggatggtggcgaacagcagtggtggtgaacagcagttgtggactgtgagcaaaagctcagcttgagcagtaacaaacatgggccaggagagtgtgcagttgcaagatttaacagtgaaaacagagctcccatacaatgtgaggggtcccaaagggggttgccactccctgctcgaatgcctggatttatatcctgatcattgtccctccccctgtgctctcaggtgatatatgatttaactatttctttacctcctgctttggcctaatttgtattttagtgaggcctctttactacctgattggttgggagtgacctcagttacaagccgcatgtttaaaggtaggtacagtcacctttcccagctaggcttaggaattcttagtcggcctaggaaatccagctagtcctgtctctcaactccagcctgggcaacagagcaagaccctgtttcaaaacaaaacaaaaaagaaaaaaatttgctgggtgaataagtaactgaaaagaatggaaagcagatcttccaggctgtgctgggttgaatagcgtccccacaaattcacgtctgctcagaagctgtgaatatgaccttacagggtctttgcagaggtaatcaagctgaaatgagggcacagtggattcgtttgggccctaatccaatgactggaggccttacagaaagagggaaattggggcaggaacatacacctgggagcagggggaggcagaggttggagtgacaacctgggcaccaggagctaggagagaggcatggccctgagtctccagaagggcctccgagggccaggggctgaggaaaggcaggtgcactgaacaactcaacaaccctgccgcttacaagtcagtccctttgcggggccttgcagacccggggagggaacagccgtgctggctgcactcgccagggataactatggcttgcttctcattggacgaagtgcccgtcaatcacacaaaggctcaggatgggcctcactgtgacttctgggccttttttctttggtcaagtaaaggggcgggacctgattggctacaggtttgaggacagttgtctccctctctagactggaaggagactggcagtggctaaagcgcctgagctgatgacttctgacgccccagagtggcgctgaggagcatttgcaggtttttggaatttccgatcaaaggtggaggcagggtttacacccaaacctagaacaaatcacccgttctctttcctgatttccctttctgagtaactgagattataacctccagggcggctttcctaagacttctggacctgacaagattcttctagaattcctcagctgccaggtgctctcaccttccctcaatctcaatgagaagcagaataaccagatgtacaaagaatttgaattccagttgtacaagtatagagagacagctgccaaagagctgtgtaggaacatggactttgagcatctcagagagcggccctctggcatgtggctttcctgccggggaggctggtggcagctgccacatcaggtctcagtgggcagagatgaagtctttgcaaacataaaaaaataaaataaaactgtctcttttgtatttccccacccagaaaaacagccttgacatatgctgttgtgtccaaaattggtggattcctgacttcactgacctcaagaaggaagccacagaccctcacggtgagtgttacagttcttaaagacggtgtgtccggggtttgtgccttctgataggcagtgagtgttacaattcttaaagatggtgtgtccagcgtttgtgccttctgatattcagacgtgttcaaagtttatcctttctggtgggtttgtggttttggtggcttcaggaatgaagctgcagaccttccaactgagtattaacagctcttaaggtggcgtgtctggagttgttcattcctcccagtgggtttatggtctcgctggcttcaggagtaaagctgtagactttcgtggtgagtgttacagctcattaaggcggtgcagactgaaagactcagcagcagcaagatttattgcaaagagcaaaacaaacaaagcacccacaattcacaagggaaccccagtaggttgccactgctgactcgggcagcctgcttttattcccttatctgaccccacccacatcctgctgattggcccattttacagagagctgattggtccactttacagagcgctgattggtccgttttacagagagctgattggtccgttttgacagggtgctgattggtacgtttacaatccctgagctagacacagagtgctgattggtgtatttacaatcctctagctagatgtaaaagttctccaagtgcccactagattagctagacacggagcactggttagtgcgtttgcaaaccttgagctagacacagagtgttgattggtgcatttacaaaccctgagctagacacagagtgctgattggtgcatatagaatcctctggctaaacataaaagttctccaggtctccacctgactccagagcccatctggcttcccctagtggatcctgcaccagaactgcaggcggagctgcccgccagtcccacgctgcgtgcctgcactcctcagcccttgggcggtcgattggaccgggcaccacagagcatggggtgacgcctgttggggaggctcgggccctgtgggagcccaccgtgggggggcttgggcatggtgggctgcaggtcctgagccctgccccatggggaggtggctgaggcctggcaagaattcaagcgtggtgcgggcaggccggcagtgctgggggacctggtgctgcctcctcccctgctggcctgggtgctaagatgctcactccctggggccagcgccggccagccgctctgagtgtggggcctgctgagccggcgcccatccagcactcccgctggcccacgagggccatgcgcggccctggttcctgcccgtgcctctccctccacacctccctgcaagcagagggagccggctccggcctcggccagcccagagaggggctcccacagtgcagtggcgggctgaagggcttctcaagtgtggccagagtgggcactgaggccaaggaggcactgagagcaagtgagggctgccagcacgctgtcacctctcactgtggagacaagatcggtgaacaggtggtaacggaatatgaatggaaaaccctggaggcgtttgggcttcagctctagggccaggagctgcctggctgtggttttaatacctgacttccaaatgtgacgttttcctggaggaacacagctctgtttactatgatggaattcagcatagctgttgtaggggaagaaaaagcattttttttcttcacctctcataagttgttagctgatctggcctcctggaataaaaagacagattaacaagagaaagacaaggcctggcgtggtggctcacacctgtaattccagcattttgggaggccaaggcgggcggatcacttgaggtcaggagttcgagactggcctggccaacatggtgaaaccccatctctactaaaaatacaaaaattagccagatgtggtggcacgcgcctgtaattccagctacacgggaggctgaggcaggtggatcgcttgaacccaggaggtggaggttgcagtgagccaagattataccattgcactccagcctgggcaacagagcaagactctgtctcaaaagacaaaattagctatatgaaaaaaaaagactctgtctcaaaaaaaacacaaacgaaaaaaacaagagaaagagcgagaccctgtctcaaacagcaatgacaacaacatcccaaaaaataagagagaggtttgtcaacatgcacatttcctgtgcacgtgggagacgcccagggagtgcctggttctcgaagtggctttgaatcgcagctcgtgttgcatcttccacagagaacagtacctctttttttttttttttttttttttgagaccgagtctctctctgttggccaggctggagtgcaatggcacgatctcggctcactgcaacctccacctccctggttcacgcgattctcctgcctcagcctcctgagtagctgggattacaagcgcccaccacaatgcccggctaatttttgtgcttttagtagagatggggtttcgccatgttggtcaggctgctctcgaactcctgacctcgtgatctgcccgcctcagcctcccaaagtgctgggattacaggtgtgagccactgcgcccggctagagaacagtacatctttagagaagtcaccaggggagaggactttgggtgttgaggggcagtcccttggggaaggcacggagctggcaggtgcaggctggttggggaagcctgttcctgtgggtgcctctggagccggctccaggcccacaagggcgcaaagatgtcttcagtggttcagctttgctctctgtggtagaaaggggagtaggatggcttctgtctctgtaaattgatgtcctgcttttattattattattattgagacagagtcttgctttgtcacccaggctggagtgcagtggcacgatctcggctcactgcaacctctgccccccgggttcaagcaattctgcttcagcctcctgaatagctgggattacaggcaaccaccaccacgcccggctaatttttgtatttttagtagagatggggtttcaccatgttggccaggctggtctcggactcctgacctcgggtgatctgcccacctcggcctccctaagtgctgggattacaggtgtgagccaccacgctgggccttgtcttgcttttaggcaaacagggtgggcagagctttctggacctgccgcttcagaactgccctgagctcaacaagcctgtgtattttggagtggcatcctctggcctcccacactgtatttcttggggaacctcagcctctaggtgcctttgccacagtcataggccatggtctgcacagtgtttgggaggagaatgggagagacctggatggagtcttggcttgtggcagttctctccagtgatgcggtcaaacccatctgataaagaccatgggggacacgtccatatgtccacaaattaggtttattagcttattctagcaggggagttactggctcccattcaaggcactgtgggccacctccccatgcaaaagaagggacatgtggttataggatttggggaaggatggaatgggggtaaaatgtaaatgaagcagttctttgataggtttaaaacaaatatagtgagagcctgtctctacaaaaagtttttaaaaattatcaggtgtggtgacatgcacctgtgatcacagttgctcgggaggctgaggtgagagggtcacctgagcccaagaggtcaaggctgcagtgagctgcgatcacgccactgcactccagcctgggcaacagagcaagactctgtctcaaaaaaaaaaaaaagaaagaaaaaaaatttgctggatgaataacttcagactggagttgaaggcctggccctcaaaattgactcaaggtcctgtctgtttgacatagttaagaaaaatgtagaatgttgtgctcattctggttatctgaagctctgcacctgggttgggattggggctgtttctctgggtcaagggacccgcatgctgctgaggcaagactgggatgttccatcttccaggcaagagtggcttgttccattctcactgatgtgacttcaaacagcaaacttgtcatggcctttgattttagcagccaaggtttccccgttctatgtccttaatgttaatgaacagagccacatttttatgtgttcacagatgaaaagcaggtcagacaataagcaggtggtttcatcaggctatcagtatggggtatcaggctattattattccctctagacttctatttcttcttatgtttgtagagaagaagcagatacagctaggagggctgaggagaatgcgggtgtgggggcaggctggcatgacatgaatttgccaacttgtctgtcatgtttcagagagattctttaatcttcccctttattgtacaaaccatctggaggacagaaaaaacaatttatcaataggaaagataattcgtggtaaatgtgtatgtaattttaggttgatcttgaactgtattgaaagctataaattttttggctgggcacaatggctcatgtttgtaatcccagcactttgggaggttgagatgggtggatcacttgagcccaggagttcaagaccagcctgggcaacatagtgaaactccatctctactaaaaaatacaaaaaaattagccgggcgtggtggcaggcgcatgtagtcccagctactcgggaggctgaggcaggagaatcgcttgagcccaggaggtggaggttgcagtgagctgagatcgcgccactgcactccagcctgggcaacagagcgagactccatatcaaaaaaaaaaaaaattagctgggcctggtggtgtgcgcctgtagtcccagctactcaggaggctgagatgggaggatcgcttgaacctaggaggtggaggttgcagtgcgctgagatcacgccactgcactccagactggatgacagagtgagaccctgcctcaaaagaaaaagattttctttcttatgtatgtgtgtatgtatttatttatatcagtgtggactcctagattaccatttgttgaatgtgttgaaattcattaccatcattaccaattttcattctcaaatcatcttgtattgagccagtgggagcgtcttcaggctggcttctgtgttcttttgatgtgttccattctttaagcacgtccttactttctagaacaataaaatgttccaggttcattttgtaccttccctaccccagccctggaatcagccatttctctctaagaagtcctggttgcttatagtgaagaatgctatctaggaacccaagattacgtgtactcactgttagcggagtttcgttgcttctagactctattcactgacggatctagggaatgtatgtatacgtgtgtgcatgtttataggcagattcccacccatagaattctttctttagatctaaaaccacaagttcatactgataccttgaattctagtccaacaccagagggttcattgttcattatagacttgcctctttccataattgtaactttttttgacaatgagaaacaggagtcccattttccttaacatattttcttaattgttgaaacctgtaattcattgaaagtggcttcagaatgataaagcagtgtgaaaaacaaacctacccaccaactagagttcaatgtttgttatcctttttgtctttattctgaggatatataattgaaatattgttttgcccattctgtggggttataaattagattttaataatgttagttttttttttttttttttttttttaggcagagtctcactctgtcgccaggctggagtgcaatggcgcaatcttgctcatggcaacctctgcctctcaagttcaagcgattctcctgcctcagcttcccaagtagctgggattacaggcatgcaccgccacacccggctaatttttgtatttttagtagtgacagggtttc[133 bp omitted]tctgtcacccaggctggagtgcaatggtgcgatcttggctcattgcaacctctgcccctcgggttcaagcaattcttctgcctcagcctcatgagtagctgggattacaggcacgtgccaccatgcccagctaattttgtatttttagtggagacggggtttctttgtgttggtcaggctggtcttgaactctcgacctcaggtgatctgcctgcctcggtctcccaaagtgctgggattacaggtgtgagccaccgcacccagccttattgttaggtttatttgtttctctttgtattcaattttagtatttttccccatcctgttgatttcattattttttgggtatgtaaagtgcaaaggcaaaactgcaaaaaggtatactgggagtagtgccactgcctctgctgacccttattcaatctcttatcccttccgccctattcctatttagcccccttaggtaaccaatctcattaggttttggtaaatcttttctttgtgttccttttttttttttgagatgaagtcttgctctgtcacccaggctgaaatgcagtggcacgatcttggctcactgcaacctccgtctcccaggttcaagtgattctcctccctcagcctcctgaatagctgggactacaggcgtgtgccaccatgcccagctattttttttaatttttattttgtattttttgtagagatcctcatcttctttgccatgttggtcaagctggtcttgaactcctaaccccaagtgatccacccgcctcggcctcccaaagtactgggattacaggcatgagccaccatgcctggtcgcatatttcttattctatcttgtacaaggcataagtactgttgaattaaatttgtcctaaggctgcctctgtagatagagaactgtaacctaacttggtttgtaaacaaactacaacctaaagctgagagaatattcttgtaacaaatagccaagtcttggtcaatcttagcagctgggctttcaaccagtcacagactgtaaactgttcagatttgtccaaagaagacaaaagtggagccgtaaccaatccagctgtttcttttcttctcttttctttctttctttctttctttttttttttttttgagatggagtctcactctgtcaccaggctggagtgcagtggcacgatctgggctcactgcaacctccgccttttgggttcaagcaattctcctgcctcagcctcccgagtagctgggactacaggtgcacgccaccacgcccagctaatttttgtacttttagtagggatggggtttcaccatgctggccagaatggtctcgatctcttgacctggtaatctgcctgccttggcctcccaaagtgctgggattacaggcataagccaccgcacccgggcttctttttatttttgagatggagtttcgctctgtcaccaggctagagtgcagtggcatgatctcggctcagtgcaacctgtgcctcccaggttcaagcaatgctcctgcctcagcctcccaagtagctggaattacaggcgcccaccaccacacccggctaatttttgtatttttagtagaggtggggtttcatcatttggccaggctagtctcgaactcctgacctcaggtgatccgcccgcctcggcttcccaaagtgttggcattacaggcgtgagccatcacacctggcccaatccagctgtttctgtacatcacttcccttttctgtctataagtactgcctacccaggttgctgggtagagctctctgaacctttactggttcagggtgctgcctgattcattgtttctttgctcaaaaaaccttctaaatttaatttgtttaaagtctttcttttctttttttttttttttgttgtttttgtttttgtttaatagagaccagggtcttgttatgttgcccaggctggtcttgaaatcctggcctctagtgatcctcctgcctcagcctcccaaagtcctgggattacaggtgtgagccactgcgcctggcctgcatttctcactatgagtcaaactgaacatttttttcacatgtctaagaatcatttttacatcttttttggggagttgctgttcatatatatatatatatttttgcctatttttctattaggtttttggtctattttcctcaaagtcctttactatatatatatatattaaccatttatctgtgatatatgtggcaaatattttctcccactttttaatttgtcttttgacctcctggtgatttttttcaccatgcaacattttattattattattattattttgagacagagtctcaccctgttaccaggctggagtgcagtggcgtgatcttggctcactgcaacctcggcttcccgggttcaagtaattcttctgcctcagcttcctgagtagctgggactacaggtgcacgccaccatgcccagctaatttttgtatttttagtagagatggggtttcgccatgttggccagaatggtctcaatctcttgacctcatgatcggcccaccttggcctcccaaagtgctgggattataggcgtgagccaccgcgcctggcccattttattaattttatgtagtaaaatttaccagtctggtattgcctttggattgtgagtcctagttagaaatctttttcttacgttctagtcaaagagctactcacccatgaattcttagaactcttgtcatttctttttttttttttttgagacagtcttgctctatcgcccaggctggagtgcaatgtcgcgatctctgctcactgcaacctctgcctcctgggttcaagcgattctcctgcctcagcctccagagtagctgggattacaggcatgcgccaccaggcctggctaattttttgtatttttattaaagatagcatttcaccatattggccaggctggtcttgaactcccgaccttgtgatccgcctgcctcggcctctgtcatttcatttttttacatttagatctctgaaccatctggaatttaattgttgatgggagttacagacctagtttgatttctttctaaatgaccacctggctgtctgagcaccattaatcacaatgcttgggtctatttctggaccttctgttccatttcactggtctgtctattcctgcttcagtaccacactgttttaattatagagactttatagtatgtctgaatatttggtagaggtagacctctctcatagcttttctttcgcaggtattcctagctcttcttacatttttatccttccgtatgaatgtgtgtatcagtttaggctctagaaaaaatgttttggcattttactagaatcgcactaagtttattaattaacttgaggagaactgacatatttatgatattgagtcatcttttccaagaacaaaagatgacttggcttatttgggtctacttctgtgtctttcaggagtgttaatgttttcctcatacagactttgttgctcttgtaaatgggttttctctacattacatcctctacttgattatcatttatgtttatgacagttactgatttccgtatgccaatcttatatcctgctaacttactataatatgtagcctatttatcacagttttcctcttcttttccaatccttatgcctctaattgacctatcttttctaattctattggcttatactagcagagtgatctaacccatcagtatattctactttggactcgagtaacactcggtgaggctcagtcgttaagtttaggtagcctgagtttaaatttgaggaggccaatatgggagtaagggggctctctgcccatggctactcattttctctcctgctctgacctgatgtgatgtccaccctgtcaaagtcgttgtgactagagctttgtgggggaaaagcatttattgctttttattgctgaagtaaggagcctggggtgccgcggaggacagggcgccgcgagcagggcgccgagctgccgccacctgccgcccggagctggcactgcacccttttagtgcaaagcaaatccctgtcccattggtcccctccttccctaaccatgaaatctaaagcgaagctcccctctctcccttccactctcctaccgagggtcctttattctatttatttatttatttgtttatttatttattatttttatttttgttatttttttgagacggagtcttgctctgtcgcccaggctggagtgcagtggtgtaatcttggctcactgcaactctgccccccaggttcaagtgattctcctgtctca[133 bp omitted]tggcctcccaaagtgctgggattacaggccaccgtgcctggccactttattctgtttagagttgttagggttgttccaggctccagagtccaaatcctgcagatagagctcaaagggtaaggtgaactgaaatgtctttggcttagctcaattctcgtcatgggggtttgaaaaagaaagcaggttaatggggagaatagaagaatgaaagggaccatgtgcaaaactggtccctatccatggagtaacaactagttgcatcttcactgtagaaaatttatttgcctttccatggacaacaatcatttgtattattatcagttttctacaacacgtagagttgtcaaatagcttaaagacaaggacaagtatagacccttctagaatcagataactcctagaaaggtcttctagacaatctgtagtgaagttaagtaataccttcaagatttcacaactgtaaactcgatctggaattcaaaccagatctatatgtttctgtaaatccaggctcttttttctgtatcaagaagcttttggactggaagagtgtttttcagcaggaattgtggtattggccacccatcaccccatttaattaaaaatccctggcctcaggacctacagcaatgtactgaagaacttcagaacctcaattagccatttgccatcttgagagagtcttgtccatggttcaagtgttcccttggaactcctgaagggcttggagcttagtctgagccatgggaaatggccaaagagtctcaagattcccactgtatcctgtgccttggagcaggcaaggagaccatggcagccctggccccggtcagttcttggctttggcagttccgggaccaggacgctggtacagccggattatcccttcatcgtgtagccgcttccagacttctctctccagcttgaagtcatggtttatgtaaaagatcagccgcttccatgatgtatcatagtagtgatcagaaaagcgctcatggccctcagtgatgaagccataagcactcacctacatcacggttggaggagaaacacggcctgtagttgctgttgcccaggcttcttctcatggctaattctgtgttgaggggtgggggttcttttccctggctccgtccctaggggtctgggtgcaggtccctggatacgcacgcataactgcatgcacccatactcatgcccaccctctttcccagcagatgtgggcacccagcccatgcactgtcctatgctgaacaggcccaggaatagcccaggagctgtttctccaggtatttctgcagctgcagtggagccttacctggtcacagagctgaagggcagtgagcagcaggagggccccagtggtggggcggtatatcctccagtgggcaccatccagggtcttagacctcagaaacctgtgaaatgccccaaacccccaactgtcaggaggctgcaaggataacagggacctgggctacgtgtcacgtgctttctgctctaacctgttcttcatgtatcggagaaagtctgggtgcagcaacaggtacctgtccatgtgcagggcttcccgaaaagcttcctggggtctgtgcctgtggttaggaaggggtcattcagactcagctcccttacctggtctggggtgggccaagtcagggtcatgagcatgactggtatcccatctccaggtgatagctaaggctgtccccacctgtccaaccctttagagccactcatgacatggctcagcctgggataaggggatggcaggaggacagtgggtacctgaaccagaaaaggttttttgacatcaccgtctgattcataagcagtgcttccagccactcatagtcccgggtgccttccaggaagtgcaagtagcggacgtcctgaggaccaaggacagggagtggtccaaaagtactgccttcaggaccaccaccgagggtggcccagctctgactccgactgcccacttgctctgctctggactggtctgactgtcctccccactcctgcccttataggaggggagcctgtaccaaccacagactccatccggatgaaagcctctcctctcccttctcacctcctgtgctccctcatccagagtctgggtgtggccaggctccttcctctttgctcaccttcccaagaggcacgttcttgaaaccccgattgcccaatataaggagtgactgggtcagggagaaggcggtaaagccgtagaaggatgtccgagtccccacatcctgttcgtagcctttaatgagagctccgctcaatctgtgcagaaagacacaatcagacgggacaggtgagcagaggagggagatttgtgtaggtggatggggaaaggaaggagaaatgggggaggcagcagttatgtgcggaaattctctcgagagcccaggaattccaccttccagatgcaggcgtggaacatcctatgggtctctcagaagagtccatgtctgcagaagaggggcaagagaggggctggaggggggctggagggggcaggagaggggctggagagggagcttgggtggggacagcttaccggaacacgtagtcgtgactgtctatctcctggcccatgtgggagttgttcaggatgcccccgttgcccaccacggcacaggtgatgcaccggaggctcccagcggggaggctggccaggagcagctgctgctggggcactggagggaagcgtgtcacgaccttctgcaccactggaacaagagtgggggtgctccattcagagccctgggagggacaggagtccgacccatcattcctcccaggtctggcaaaccccagggaagaggcagaccagaaagccagctgccctctgccctctgccccggcctactgcgcacccacaccttcccctgggttaaggactcacaggagtagttgagctccatgaagccaaagggtggtgcaaagtgttccaggcggtcccactcactctggttgaagtgtctggagtccaggaagagagtgaggttgggcagaaagagtttctggagccacagcgacttggaggctttgatcttcacagagtcagggcaagtctatatacaggaggacgaagtcaggaagggagagacccagaaaggccatcggccaggggctgcaccactgcagcaagggctggggctcgcagtttggaaggcgcggcctctgctacctcttccattctgttctcagggtctgcttaccctccccttcccattgtctgggctcattgtggtcctgagggttctgggaaatgggtgttctcggcca[200 bp omitted]gagg[136 bp omitted]tgtgagaggggccgcatcctgggaatgtggcatgtgtccagtgtgctgtcagggccatgcttccagtcatatgtgtgtaaatgtgtgcattttatgggccttctccctccctccctccctccctccctccctccttccttccttccttccttccgtctttccttccttccttccgacagggtctcactctgttgcccaggcgggagtgcagtggtgccatcatagctcactttaacctcaagtgatcctcccgcctcagcctcctgagtagctgggactacaggcatatgccactatacccagcaacatacacattttggacactgcccctctgcaaggacaggtgagaaggaccatgtgggtgggtgtggttcagtcagactgtttccttagggttgggagagagcgaaggctgtggaattgactttgcagggaagacaaggcattcctggaggacagagctgggcatgaggttggggtgtccttgtctgtgagtccctcccctgcagcccccgcgagaggatggggattcaggggccaagccccagagtagatcacactctgtcaccccagatggatgacctccaggcctcaggagctccagggcaggccccatctcactcacccctcttacgctgtccacaccaggggtccggggcctgcctgctcctcctcccccattgtggccatcattggaaagacaagtggggcagagtcttgtagggctgagctctgcctcataatgagcttggggcaggacaagacaaagtctagaagcagagcccaggaggtgaggagagggtgggctgggcttcctctcaggaggggcttcagagctgggagccagagggaaggcgtggtggcaaaaactcaccgtctgaaggcctcctatttcgaagctgtatttttcctcaaaatcccaccgaggctcagatttgaagttggcggccttcagtctttggtttctctgcgtcgtggggctctggaaaggggcagggggtggggtggcctgaggtttcttctccttaggtgggatgactgctgtggtcactcctttctgtctcgtccttgttgacactgctcctgtgggagccagcattctgtgctgacttttgggaatgagcgtcttggctgtggttgccgctttgccctggtgcttctctgacaccgtcctggaggccgtcagcttcctggtctggcccccatttccttgggtcgtctttgtgtcctggctcttccatgattgtgcctctgtcctgccagaggccatccctgcatcttgccctctgggtgacagtgtgttcaccatggttttctctttttctgggctcttccatgctgccctctgtgctgtgtggggcaccttgtcctgctcctccggcggtgcctggttggcctcctttcctctgtctccggtggtgtgggccttgggctgggtttgtgtgttgagggcattgttctctggcactggctctgcatagatggttgtcctccttgcccttgtgggtgcctgggacttaggctttgccagggactgtagagacctttctttaatgttctctgtgcgttgatgcctagggacagagataacctttgatgaaggctgaagattgtggaaacaggtcagaagcataagtagttttttgtttttttttttttttttgagacacagtcttgctctgtcacccaggctggagtgcagtggtacgatttcagctcactgcaacctccatctcctgggttcaagtcattctcctgccccacccccctgagtagctgagattacaggcacccgccaccatgcctggctaatttttgtatttttagtagagatgggggtttcaccatgctggccaggctggtcttgaactcctgacctgcccagtgatccacctgcctcggcctcccaaagtgttgggatgacacgtgtgagccaccgtgcctggccagaaaatagattcaaacaaaagcggaatagaatttgagatatgtacataggacatacaggagagcatctcatccgacaaacgtttactaaatgtctattctgtgcagtgtgctgtgcaggcactgggaatacaaattggaataagacacagaccttggacctatgtgatacacgattattgttattcgaggcaggaaacaaaggtctttgatcactggagaaaggcagggccggccaaggcaatatgggaagcaggctgattacctatgcaagcccttcctccattaaggcctcctagcctgagctgcagctgaccctgggtggtatttccagcctttctcagcctcaaagcaacacatttattcagggtctccagcgggggcactctctattctgaccttgaaactgaagcctaaacttcccaagggtgttaggaaagggctgacagctgacagttcttcctccttacctcccagggatccttcctccttgaaacccttctttttttttttttttttgagacggagtctggctctgtcacccaagctggagtgcagtggcgcgatcttggctcactgcaccctccatctccctggttcaagcaattcccctgcctcagccttccgagtagctgggattacagcgcatgccaccacgcctggctcttttttttttttgtatttttagtagagatggggtttcaccatgttggccagaatggtcttgatctcttgatctcgtgatctgcccaccttggcctcccaaggtgctgggattttacaggcgtgagccaccgcgcccaattttttttttttttttttctttaagagacagagtcttgctctgtcgcccaggttggagtgcagtggcacaatcacagctcactacagcctcaaactcctgggctcaagcgatcctgtggcctcagcctctcgagtagctgggactacaggcatgcaccaccatgcccagctaatctctgtgtgtgtgtgtgtgtgtgtgtgtgtgtgtgcacgcgtgcgcgagcacttgtgtgtgtttagagactggatctcactctgttacccaggctggtctcaaattcctcacctcaagtgatcctccacccttggcctcccagaatgttggtattaaaggcgtgagccaccgcgtctggcctaaacacacacatttttaactggacttgcatagaaaatgcctctgcctttgttatatgactcaaagaagtagcttggatgagagatatttctaaccagaaaggagagatgggcctcaggacagggttggactgagatatggagcatcccgaaaaggctaatgggcttcaaaccctaattctttctgtatttttcattttcaactaagaaaaagaaaaggaaaaatttattataagaatagaaagtgtttcaaggaacccaagagcaggaagtagttgagcctctgggggggcttggaaccaggaatcgctctctaaggctttgtctctatctcacctctccctctgaatcagctttcttctactctttctgtctctgcagacaggcctcctctgctctccaacccacaggctggtggaagatggccaccccataacacctgtactggggactgtggactcccttttctcccaatttttcactctagcagaagactgtggcccccttgggtcctatctccatccctttccaggggtctcggtcacatactacatgacattctggggcccactctgtgcatgggaggaggacactttcaagagaaagagggggttattggttcatgaactgggaagacacccccaaaatatccattctgaaagaatgccactcaacacagagtgagaaacctgagtgagtgaagaacacattcttgatcaattcattccacatttgcctagtagaaggtctgagtgctgtgtgggtgtgtgtgaggctcaccactccccttggtctgactactcagtgtaacctctaagctcacgtgggccattcagcaaaaaccaagctgttcacccggtttaacaaacagctcttgttacccagcaaagcctcttggtggattcaccctgacctccacttcccaacccccagcctcaagaagcctatggaaacttcccttccaaactccggcagccctcggcagagaggaattctgctgaatgacattttccctatctcgaacattttcatggatgtagctgcctggctggcaggcaccttaacttggccgtggcggggagagatgatgaggcaggggtggtttttgacatcacacatctcaggccacacatagcatggacagctggccgtctgcttagtggccacactgaccctgaagaggtaatgcactcctctctggaaccctgtctagcagcaggaatggcgcagtgactcctggaaggcctattcaaccgcaaatctacaattgattgatgactcctttaggttttgcaggaagtcacagcaataatccaggtagtgacaaaattatgtaattaagtttcatttaattccctataattaaatacacctgtgattgctagggctgtgggtgttgagatagacatttccttattctcatgcacagtatttactaaatgctcaaattgtatccatatgctgagtgccccatattcaacgcgttcggccctgtgtggtcctgaccctgtgagctgggctggggtgtgggaaggctttcttctattaatgacttctagtccagaggcacaggcaaattaatcatgggtcataccaaaacaaaaagcgacttaactgcataattctgatctactagggaagtaaaaatataaaatgttgcactttaataaatgaatttattggctgggtgaggtggctcatgcctatagagccagcattttgggaggccgaggcgggcagatcacctgaggtcaggagttcaagaccagcctggccaacatggcaaaaccccgtctctactaaaaatgcaaaaaaaattagtttggtgtgttggcacgcacctgtaatcccagctattccggaggctgaggcacgagagttgctcgaacctgggcggcagaggttgcagtgagctgagatagcactactgcactccagcctgggtg[142 bp omitted]agaaaccccatctctactaaaaatacaaaattagccgggcatggtggcacatgcctgtaatcccagctactcgggaggctgaggcagaagaatcgcttgaacctggaaggcggaggttgcggtgaaccgagatcgtgccattgcacttcagcctgggcaacaagagcgaaactccatctcaaataataataataattaaaaatcaatcaatcaatttatcatgaacaagaatcgcacaataaaagaaacaggaaaatagttatctggcaacatcctccctctctgtatatatatattttctttttttttgagactgagtctctgttgtctaggctggtggcacgttcacagctcattgcagcctcgacctcccgggctcaaacgagtctcctgccttggcctcctgagtagctgggactacaggtgcatgtgcccccaggcccagctgccttctatattcttcagtgtacatcaccaaggggaacctggaagtgaagaaatggcaaaaggttcaaagttcgtttatgcctgcagccatgaaacacctattggccagagagcggtattttccaagaatacagtacgagagataacacaggaatgttgaagttgactaggatattgaagaggctgaaactgaattttgaaaaaataccccaaggaaaggtcactcactaacaaagccagtatgagtagaagattattttatggaggaggataagaaaagagctgaaaagactcctttgattcgctaaataattttgcacctgggctcccgccttctatggcatggagagcgagcggaagtggctgcaggtgagttgcgcctggtatgtgggaatggctggtcacacagaatcgcctctacttacgtccttaagtcctgggctctttctcagtccccaccatcaactttgccctcattttatctcaggccccctggctgggtgagctttcctcttccaggttacatgtttggttcccacagctttgatgctgcttctccttgaaaggaggacaaactaacacttcgctctgccctgtgtccctctccactccctgctgtggagctctctaccttgaactgctcctgcctcctgtgccccacattgttagctgggcctggagttcccaagacccccttggtgtccacgagggctattccagcctccttttggtatttgatcagttcttcggggtctcctgtcttatgtgagatagaaacc[134 bp omitted]ctggccaacatggtgaaaccccatctctattaaaaatacaaaaattagctgggcatggtggtgcatgcctgtaatcccagctacttgggaggctgaggcaggagaatcgcttgaactcgggaggcagaggttgcagtgagctgagatcgtaccactgcactccagcctgagtgatacagcaagactctgtctcaaaaaaaacaaaaacaaaaaacaaactccaaagtttatcttccttggaaaatcctgaaagttttctaaaagtgaatgaatgctttatttttacgactttactttgactttagatgtgtctatacgctgcttccatgactaaaagctgtatgattgccttaattatctttgtatgctggaaaaaaatggcagaaatccattttctcttgttattctgagtgttcttttctcaaatcaaagcctgtgtggtggttttcagccacctcaatcttagtggggagattctagtggggatgttattatgttctgggactcgagagaaaacagaaggaaaatgagtcagttgctgctcatcatacttcagtggctggatacagcttccagagctccccctgaacagacaggtccccagcattctcagagatgcccttcgcctagctgaattcactgtgggccagaatgccagtcagctggtttgaaagttagatgtcctacgcctgtaatcccagcactttgggaggctgaagcaggcggatcacttgaggtcaggaattcgagaccagcctggccaacatggcgaaaccctgtctctactaaaaatacaaacggctgggtgtggtggtgcacgcctgtaatcccagctactctggaggctgaggcaggagaattgtttgagcctgcgaggtggaggttgcagtgagcagggatcgcatcactgcactccagtctgggcagcaaagagagactctgtctcaaaacaacaacaacaataacaacaacaaaccaactaaatgagacatcttatggaaagttctacgagaacttgacaacacaatgcaatgtttattctgcaatattcattgagtagccatgacatgacaggcattcagaggtatctgctagagattaaagataaaaaaagcaatggtcactggttttaagaggctcacagtctataagagaaacagacatgagtataagcagctgccttaaagtgtcatcggtatgatattagtcatacgtgtgcgaggcagtggtgacagcctagggaggcagttctgctcggggggatactttggtatgtaggggttacctaagctgagtctttttctcctgagtcttcagaagtgaacttttatgaattatttttatttttataaaagcaatgtgtgcttattacggaaaaagcagaaactgccttaaaacatgaaaggatagcaacctcctattatcccagtcccttcaaagaatctactgttagtacctcagggcatgaacagccgcatcccttttctacgcctgtcatgcttttgaatacaattatatactattttgaaatgttatttgtttccctctccaccccacccccatacctccagcagttaagatttggtttcatgttcaagatgtagtgaaacagatcaatcttggagaagttatgagggggaaggactttactacttcttaccatcattgtccttcccctggaaagatcctttactctggtgggtggcggaaatgagagaaggagggatctgtgagttccaaggtcagaggaccctgcttcctggcagtgttccaaaggtctaacaagacccctggaaaaaaaaagaatcctgagcctaggaagacaggaccacagacagtgtcagaaaagtctcacacggagctgagatcacgccactgcactccagcctggatggcaaaacgagactccgtttcaaaaaaagaaaagtcctcccgcccggccagcctccccgtccgggaggtgggggtagcccccacccagccgccgccccgtctgggaggtcgggggcgcctctgaccgccgccccgtctgggaagtgaggagcccctctgcccggccgccaccccatctgggaggtgtacccaacagctcattgagaacgggccatgatgacgatggcggttttgtcgaatagaaaagggggaaatgtggggaaaagaaagagagatcagattgttactgtgtctgtgtagaaagaagtagacataggagactccattttgttctgtactaagaaaaattcttctgccttgggatcctgttgatctatgaccttacccccaaccccgtgctctctgaaacatgtgctgtgtccactcagggttgaatggattaagggcggtgcaagatgtgctttgttaaacagatgcttgaaggcagcatgctcgttaagagtcatcaccactccctaatctcaagttcccagggacacaaacactgcggaaggccgcagggccctctgcctaggaaaaccagagacctttgttcacatgtttatctgctgaccttccctccactattgtcctatgaccctgccaaatccccctctccgagaaacacccaagaatgatcaataaatactaaaaaaaaaaaaaaaaaaaaaaaaagattcccatcacaccctaaacctaaaaggtttaggataaataaagatgtgaattaaaaaaaaaaaaaaaagacatagaacagtcaccacaagggtccctcatgttgtccttttatagccacagccactttcttcctacaccaccccctcctcaacccctagaaacaccactcatctgttctgtatttttataattttatcatttcaagaatgttatttgaatgcaatcatacaattatgtaagcttttggtactggcttttcaaaaaaacagaacaaaaaaaacccaaaaaaagtctctcacacataagccaggtggacctgaaagagccaaggggcaggaacaatggctgtttcagcagctactcaatagcgaagggtcagcgtcccactcccatgccttggcaccgcatcagatgtcctggagcccttgataccatcctgcagaggggcaagaagagctgagattaagttttcctgaagcttggtggatgggagttcagaatcagaaatcaggaggtgatagaaaataaagttctgttcttttctttttggacacagagtctcactctgtcgtccaggctagagtgcagtggcatgatctcggctcactggaagccagtgcccaggttcaagcgattcttgtgcctcaaccccctgagtagctgggattacatgcatgtgccaccgtgcccggctaattttcatatttttagtagagatggaattttgccatgctggccaggctggagaacataaagtgacaacaagaaaatgacaaacagaacccataggtctgtttttacagctcactcttttttttttttttttttaatggaacgctttacgaatttgcacgtcatccttgtgcaggggccatgctacacagctcactcttaattaccatctctaaagctaaaacaagcatagatcttccaaaacatatttataccagactatggaagccaagcagagacatagtcttagatgacatctacacatcactgaacaaatgatgcacgtgggtgcgtcttaagatgatatgagagatggcccgatgggtttgaaatcatagaattgtattttttattttttttttgagacagagtcttgctgtgtcacccaggctggagtgcagtagagcaatcttagctcactgcaacctctgcctcccgagttcaagcgattctcctgtgataaaagcgataatactcagcctcctgagtagctgggattacaggcaaccgccaccacgcctggctaacttttgtatttttatttattgattattattatttttctgagacggagtttcactcttgctgcccaggctggagtactgtggcatgctctcggctcacagcaagctctgcctcccggattcaggcaattctccctgcctcagcctcccaagtagctggaattacaggcaccggaccatgcccggctaatttttgtattttttaggagagacagggtttcaccatgttagtcaggctggtctcgaactcctgacctcaggtgatctgcccacctcggtctcccaaagtgctgggatttaggcgtgagccactgtgcctggcctcagaattgtcttgaagttcttctgctacactcctcccaccatcctatttgttgccaagtccagctgatctgacttcttctcagtcctttcttcctgttcaaactgtcctcgctcacggtctcattaatgctatcctaaaccgttgcaatggtctctaaactatcccctctaaaaccacgttcccccgatcatccatcctgtaatctattgacagagtactctgcataaagcatgaatttactcaagttaactcccttactctaaagtttttgagagccataaagtttaaacgttttggcctgttttttaaggtgacaaattcattctttcatcaacaagcatttataaagcacctccactgggtccaggccctgttcatagcactgaggaaacacagacaaataagacaatgccggccgggtgcggtggcccatgctgtaatcccagcactttgggaggctgaggcaggtagatcacttgaggccaggagttcaagaccagcctggccaacatggcaaaaccctgtctccactaaaagtacaataattagccgagcgtggtggcgtgcgtctgtagtcccagctactctggaggctgaggcaggctaatcacttgaacctgggaggtgaggttgcaatgagccaagatcgcgccactgcactccagcctgggtgacagacccagactccatctcgaaaaataaatgaagaaattacataattcatgtaatctcacaaattcatataattacatgataaacacacacacacacacacacacacacacacacacacacacacacacacacacacacactaggtgttctacctggctctaagctcttttattccaccaagccagccaggccagagctcagaccttggctgctggaggtagggagtgggggtgggagacgtgggggatgagatgagggggagattggggaagctggagagaggcgggcagtaaaaatcataggcactgagaaaactcctcttttttcaagtcgttaactcctctggtatggttacttaagtgagcgcctgtcttggagggtggggctagggggtccctgcctgccctgaggttctttcggcttctgtctgatgttgggggcccctgctgacttggtggtctctgcacattagtaaatgtggtttctctggggaagggttctcctttacactgagaatccccgcaggagggtcctttctaggatcacgtctcccactgccccctgcggcatttagtgtccccaaacactgttctggagtgagtgtcccattattgctccggcaggtaactgggcagttgagggttctggtctctgccctcccaccgggaagtgctgaactttccttccactgccttctgggctgtgaagacctgggagggaggggcagggtggttctgcctcttcccaggtacattacatcgtggacagttccaacaacttcctgccttcagaaatctctagaccagaaccaggcatcgctctacttaacatttgccccttaactccagggcatgtggcatctgctgggaaggccaggcccggtcactatgagtgactctcaggcagcccattcccaccccaaaacatcgccccaggaggactctaaccctctgagtttctctcctcccctgtcttcttatctaagctagcttgtcttgggtttttgtcagttgcgatcaagtgttccaacaaatacaaacctatattcacatcatacacaaaagaaaatttctgatggattcttattaagcttaaagaacaaaagtacagaaatattaatagaaagtgtaaaagaaaatgtatataatattagggttgggaatgaccttcctaaaaattgcacaaagtccggtgaccacaaaggaaaagatggacacatgttattgatgtaacaattacttctgtatgacaaaagatatcacaaacagtgaaataaaaccaaacaaatatcaggctgaagaagatattttgaaacaggaattaaaagaaattaaagaatgtgtaagcaaaaactcagatgtatgtaaaaaaaacccaattccctctaagaaacaaaaagaggtggaatcctttaaaaattaattgcctgtttttctgtctgtggccagtgagccttatctctccctttcccaggcattgtgaagaccttgtctctgcagctgtgtagctgcaaggtcactaggcagataaactcaagtcgtaaaacatatttttccttgaaaagtaagaaatgatgtaatgcatgtctcaattgagtaactgtctttgtttcttgcttctgtaatatgcttccccctgcacagatctccccctgccccacgaaatgcttaaaaggtaacctgacgctttgttcggggctcagtttttttggatgttaatgtgactgggccagtgcaccttaataatgataataaatcctcctcaacccttcagtctctctgattcctaaattatcccactgcatttagaagtattgtaacatatatgataaaaaggttaatatccctaatatacaaaaagctcctacaaatatgaaaaaaataataaaaaggaagaaaagatatgaacaggtcattcatagaaaagtacaaatgactaagaaagttaagattctcaatacatcagtgatctgagaaatgcaaattaaaaagagaaacactttcacctatctgatgattaagacttcaaaaccctaatgaaagccagtgtggtcctgggaggtaaagtaaacttgcacctgtcagtgtagcattctgagacaacaattcaatggtgtccactgacatttcatgtaaacatatgcattgtcttggcaattccacttcaagaaatctacccggaaatcacttacgcaagtgctcaaaggtatgtgagaaacttgataggggttggttaagtaaacagtacctaccctgtggaatgctaagcaactgttgaaagaagggagtggacctgtatgtcccgacatggaaagatgtccatgatatagtgtgacttacaaggtcaacctgtggaacaatatgtagcatgagatacatatatatgtatatatacgtatatatgagatatatatataagctctcttgtgcatatatatgtaaatctatatgatatatatgtgtatatatctatatctatatatacaatatatctatatatacatatctctcatgctacatattgacatatagtatatcaatatatagcgtatatattgtatatatatctccatactatatatagatatctatatctccatctatctatccatctatctgtccatctatctgcctatctctctatctctctctctctctatctgcctatctatctatctatctatctatcatctatctatcgggcttgtatagcataaaggtaatgagcacagggtatggcaccaaaatgcctgggtttgaatcttggccctgccgcatactagcagggtgaccttgggagaatcacttcagttctgtgtatctcagtgtcctaataatgagaattagtgagttaacgtatatcaagcacttagaataggggctagctcatagtaaatactatagcagtgttagctacataataatagaattccgtgtaccctcaagtgtcaagagtggtcaccttgaagagtggatagaggtggaggtataatagggagaccctcacttcctgcttcacctttctgtattttttttaactctatgagaacctgcattactttcaacgtttaggaacagtgaaatgaaattattggctgggcgcagtggctcacgcctgtcatcccagcgctttgggaggccgaggtgggtagatcacttgaggtcgggagttcaagaccagcctggccaacatggtgaaaacctgtctctactaaaaatacaaaaacttagccaggcctggtggcatgcgcctgtagtcccagctactcaggaagctgaggcttgaacctgggaggtggaggttgcagtgagctgagatcatgccactgcactccagcactccggcagcagagtgagactccgtctcaaaaaaaaaaaaaaaaaaaagagggcctctcactgctggagatgtgtgtattttctaagaaaaatggtctagaaggtatttttgaaggattaacttggcgtccacaattgaaactgcatccctaagagggaggctctccattttaactgacaaacttagggtgagtccgggtctgaaacaagtggaacacacagcatggctctttcgcttcaggacgtagagaatggcatgtaagaactaacccagtgctgctgccattactcacagtcccagaggggaaagcagtcatgtcttctgtctgcactctgcagacctaacccatcagttctcaaactcctgtacgtgtcccacagtatctggacatgtccatcccatgcgtcttggttgcccactgccaccctttctgttccctgcaagtcttcccattagtctttcttcccagtgcttcttgagaacactcctgacccctgacactcccatgtggacacacaggtggctcagacttccccagtcctccctgggctatcatttttctgtttcctcaaatgaatgaaatatgaggagtggaaaggacaagaatcttacctggaaggctttgtttgaggctccttaataaaagagggcaaggcgaagagaaagaagaccaggacagccagaagcaaggaccactggacgccttggctcaggtgcctgcatctccacaggcaggacctcatggtggtgggtcgggttctagaggaaggttctgcatgtcctggggccttgatgtaggcagctgggagtctcaccgctcaggtttcctggccaggaagtgcacaccctttgtcttaacaatgagccactccggcaagtgctgagtttatcagtctctgcctgggaagggaggaaccgccttcactgctgtatgaaggcttataagctggcgtggcttaaaggaagggaaactccttgtgttcaaacatgtttaccttccttttttgtctttgaagccaatatctgaaagtcaagctttatgagaaatataaccacattatatgcagtctcatcttggtcaggttacttaacccatctgccgccatataaatggaaaaaagcagttatcttccttttgggattatcatgaagacaccttgaggccaccatgcacagggctttgtttgtggtaggcacccaacacacatgttcaacactttagctcaaccttctctgtttctcttctgaaatcatgaccattacaacaatgaccagcacgtatgagggctcactctgagctgggcagtggggagtcttcacaggcactcatggaaccctcacagccactctaggggctgggtactgtcatcacctccatttgacagaggaggaaatggcctccaagaacaagctgccagcccaagagcacatggtgagccactggcttggggtccagatccaactgacctagagattgcattctttttttaagaaatagagatgggtctcagtatgttgcccaggctggtctcaaactcctggacttaagtgatcctcccacctcagcctcccaaagtgctgggattacaggcatcggccaccatgcccagccatgattgcatttttctttcttttttttttttgagacattctcactcgttgccagcctggagtgcagtggcgcaatcttggctcactgcaacctccgcctcccgggctcaagtgattctcctgcctcagcctcctgagtagctgggactacaggcacccaacaccacacccggctaatttttgtatttttagtggagacggggtttcaccatgctggccaggatggtctcgatcttctgacctcatgatccacctgcctcggcctcccaaagtgctaggattacaggtgtgagccaccgtgcctggccgattgcattcgtatccactgcttagtagcacctacgagaaatcattaactctaccttgatcaaagcaatgcaaaacaaaacccacataattcttgggaaaaaaaagtacacctcagaggaaaaacatcaagaccatttgtagaaaactttaaaaattcagagaagcagccctccataaagtactgtgagttagtaattttataaaaatattgtccagggtgttgaactgtgggagaggttttggagcctgggctcactgttcacacctggcggtgggcatttctcctaacgtacagttttcagttctgtacacaaggctcttggccttcacccatggcacgcaccgataaatgattaaaccaccttcctcaaggaggacgaaaaaggcaggaacatacgtctgagcagctgagggtaatacagacgactgatggtttcctttatcccctactgtacactgcaactcacagcactgtttcaagtcatggtggcaaggagaaacatctctgttagtactgactcaacctctctctttctctctcaccgtgcctaacctacagatgctcatatgttaactctataaacattttctgaattgatctgtatcaagtcataactctttgtcctaactggccccttatcctgagttcctttatgcacttgacatgtacaattatattcctgtatcctggtgcctgcttgcaacgctatgcaaataagtgcacagtgaaaaggcatgttcttacccacagtactagtgtgactaaatagagtatctctttcatcgtgccctgtgttctgaagaaggcactggctgtcagtgctcgctgccttccgcagggcatggagatccagctgagctcctgggtgcaagctgagctactgtggacaatctgtccctctcgccacattagaggcaggttgaacttgaagaccttgtggccaactggtgtggcaggataatccagagtcctagtttcctggttctcaggttccagcccactgctgctgtagcatgtgcctgggcagaatgtgggatccagagaagtgtgtgttttaggagaaattgactttccaattattttgtttttgctttttgagacaaggcctctttctgtcatccaggctggagtgcagtggtgcaatcatagttcactgaagccttgaattcctgagctcacaagatcctcctgcggcagcctccctccaaagtagctgggattacaggtgggtgccaccacacctggcaaattttttttgtagagatgggggggtcttgctatgtcgtgcagtctggtcttgatctcctggtctcaagcgaccccacttcagcctcccaaagtgctgggagcacttcatgtgagccgccacgcccagctgccaattattttttaaacatcgtcacaattttgtgtttggtaagatctacctttctctcctttttattgttttattttattttattctcttaagctcaatggcaaaaactttttctcctttttaaactaaagctttgagcttgagtctttgaactttagtatacatcagctgatgggacatgtgagaacttacatgcagataagagttgttaaaagataattttcagtaaaaggtaaaatcattactcaaatagatagaagacataaaaatgtgctaaagatttgattctactcatgagaggaccaggcagatataataaccagttcaaaagagaagtgcatgagcacaaagtaatttagattgtttttcatttgcttctttcaagatttttctctatctttggctttcagtattttgactatgatgtgtctgtgtgggtcttcctgcatttattcacttggagtttctgggatctatgtattagtgtttttcaacaaatttcagaagttttcaggtattatttgtttgaatatttttttctctctatctctgcctcttgagcattctttcctaggatgagtatgttggtgtgcttaacagtattctacatttctctgaggctctgttcatttttacttattatttttcgtagtgttcttcatctgtattaatctgtcttcatgttggctgattcttccttctgccaactcaaatctactattgagcccctctagtgaatttttcattttgattatttatttttcaacttcagaattttcatttacttaataattttgttctatctttttagtgaacattctctatttcatgagtcattattatcatgcctttctttaatcttcaattctttaaacatggtttacattaaaaacttttttttttggagacaaggtcttgctctgtcactcaggctgaagtgcagtggcgtgatgataggtcactgtaaccttgaactcctggcctcacgtgatcctttctccccaacctccctagtagttaagactacaggctaatttatttaaatatatatatattttgtagaaacaggttttcactgtgttgcccaggctggtcttgaactcctggccttaagcaatcctcctgcctagaactcctgaagcattgagattataggcgtgaaccactatgcctggtctacttcgatttttaaaacatattcataatagctgctttggagtctttttccaatgtgtccaatatttaggtcccttcaaaagcactttttattgcctgacttcttttcctgtgtatttgtcacagtttttttgcgtgtcataattttttgttgaaaaccagacattttagataatatattgtagcacctctagatgctgaattccccactacactggggcttgttggtggaactgttgtttccttgggcatttgtttatttaattctgaactaattctatgaagcctatttcctggtttgtg[134 bp omitted]acctctgcctcccaggttcaagcgattctcctgcctcagcctcccgagtggctggaactacaggcgcgtgccaccatgcccagctaatttttgtattttcagtagagacagggttt[131 bp omitted]ggtacacagtttccaccctacaagtggggtctgggttggggaagggagccccagccctcttggccacacctgcatggaatacagtttttgcaacgcagagctggaagagatgagagacaccagtgacacacccttcttagagtgaaactgcagcctggagtggaggcagagggagccccccatcttcttgggaagcgacacctgcttgggaagaagataggagtgggatgtgactcaggtgccacagactgtttattcttactggtattcaggagattttcttgaataaatatttcttcatttgctgtatgtccttaggacaacataattttatttcaattatttaaataattttcaccaattaggtcaggtgcagcggcttacacctgtaatcccagcactttgggaggctgaggtgggaggatcacttgagcccagaagtttgagaccagcctgggcaacatgctgaaaccctgcctctacaagaagtacaaaaattagctgggcgtggtggtgcatacctgtagtcccagctacttgaggggctgaggtggaaggatcgcttgagcctgggagatcaaatctgcagtgagctgagatggcaccactgcactccagcctgggtgacagagccagaccctgtctcaaacaaacaaacaaacaaacaaataattttcaccaattaaatggctgttttgtagggagaggtctgctgagttcctcacatagccatctcagacaggccacgcataactcttgtggtgaactgatatgagcacaaaagaaggccacgtggcctgttgctccatgaaagagccgtatccacaaagcaacctccaaatgctgaaggagccaaccaaccagaggaggaggcagacaaatccagttggtcagcatgggatgatttactgggtaaatttacagatagaaaagcatggtcttggggggctgcagacatgtagatctctgcaatgcaacacctcaaatctagggcttctatcttggggaaaagtatatgtgctctggaaggaatgtgtaggtggctatgagtatcactacgcctatgatgtctgcaacagcatctcggattgtcttggaggaaaagtgaaagttaaaatgaataggtgttctacctaaagagtaatacatcagctacacatttggaaggtattctcggactcagggtcggtcaggcagattagcgtttaaaataaagtcgctcttgtccccgcgcatatgtttcagtatataaaagttatatagcgaattttaagtcaaagttacttaaataaaactgaaattgtacatttgattttgaaaatgtaattaaatattttaaaagcataccttggagatattgtgggtttgattccagaccactgcaattgcagcaaagtgagtaacagaaatttttttatatatgtttacaccgtaatgttttcttccttccttccttccctctctctctctttccttccttcccttccttccttctcttccatccttcctccctccctccctccctctccttccttccttccttctttccttctttccttccttccttccttcgactgagtttaacttctgttgcccaggctgcagtgcagtggcacaatctcggctcactacaacctctacctcctgggttcaagcgattctcctgccaaagcctcccaagtagctgggattacaggcgtccatcaccacgcccggctaatttttgtatttttagtagacacagggtttcgccatattggccaggcttgtctcgaactcctgacctcaggtgatccacccgcgtcggcctcccaaagtgctgggattacaggtgtgagccaccgcacccggcctataaagtgttttaaaattaacatatgtacattggtattttagacataatgctattgcacacaaaagaaacatacacgtgtgaaacaatgttgtccaacaataaacaggaattttattttgctgagtcctaaaataaatgaaaacaaagaataaataatattacataaacttagttcataaagtggcagcagggtttgagaggatttacttcaatgttgaaagaatttctaatgtggatgggcaaaatggcatcaaacgtcacattacagaggaaactttcaatctatgcagcaagctttactgttgtcttattttattttattttattttattttatttttttgagatggagtctcattctgtcacccaggctagagtgcagtggtgcgatctcagctcactgccatctctgcctcctgggttcgagcaattcccctgcctcagcctcccgagtagctgggattacaggtgcacgccagctcgcctggctaatttttgtaaaattagaaaaaaaaaacaccacaaaaaaacaaaaacacagcaacttcatagacaaaaaaggaaaaaaaaagaaaccttttctctttagcctttttaaccatctcatacaaactaagtacatacacagaaaagttactggaatgctcagaataagattgttttcctgttgtcttttttttttttttttaacaaggtttttttttctcctttgagattacagtgaacatggtcacactacaagtaaagtcagaagtaggacagagaatgctccaaaggttggtttggttatctgagatcattaaaaatgggtggccctaggctgggcatgatggcttacgactgtaaacccagctgcttgggaggctgaggcaggaggatcgcttgaacctgggaggcagaggttgcagtgagctgagacagcgccactgcactccagcctgggtgacacgagagaaacttcgtctcacaaaaaaagaaaaaaaacaaaaaaaggctgaccctaacaatatgtgcaaaaatataaaatgtaagtaaaaaacacaaatttccttttcaagtatttttatggaggtgaattcatactaataatcatagtaatattcctacaataagattagtctttttaaaaaaattttactttaagttctgggatacatgtgcagaacatgcaggtttgttacataggtatacatgtgccatggtggtttgctgcacctatcaacctgtcatctaggttttaagccctgcatgcattaggtatttgtcctaatgctctccctccccttccccaaccctctgcccctgccccaagaggcccaggtgtgtgatgttcccctccttgtgtccatgtgttctcattgttcaactcccacttatgagtgagaacatgcggtgtttgattttctattcctgtgttaatttgctgagaatgatgacttccagcttcctccatgtccctgcaaaggacatgaactcattcttttttatggttgcattttcagtactttgaagaaaaagagcagggccttggaagttttggttcttttttcctcccctgttgcaaattctcatggtttgagttgggtggtggagagtgcgtgtcatctgcgggtggtctctctacctgaaggtgactacgtttggattctgagacaggaagtagagggtgactaggtcacagtcattttttttttttttagtttaatttttccttttttgctgtctagttgtcctcatcaatcttctgcttcttggtatggacatcatcatccttatcatcttcagctactcacttgcccatagcaaactcagcttcctcgtcttcatctccatcctcttcctcaccatcaccttcttcctcttcttcatctacctcattgtcaacctcctgctcccaattttcctcattagtgttcccattagcagaggcatctcttccatttccgcctcctccacaacttccttcttctcctttaagtccttggtggtgatctcggagctggtgtctatggctgcatctgacatgatggggcatgccggtgatctgatacaggggattaaaaaggaatcgagaattcgaggactctggtgataaagctgctggagtccacggaggaggaaccaaggagccagacgaggaacaatgcaaagatggcttttcagagcagccagtgggggctgttttcatttcaacagtgttcagaggagtagattccatctcaagaaaccctcttggtgcatgcataagaagcaacttctaatctgtagaagtttgatcatgagattgcagcaactcagccacatcttcaggctccacctctaattctgcttctcttgctgtttacaccacatctgtggtgacttcttctactgaagtcttaagtccctcaaagtcatccaccaaggttggaaccaacttcttccaaactcctgttatgttgatattttgacctctgcccatgaatcatgaatgttcttcagggactctaaaatgatgaatcctttccagaaggttttcaacttactttgcctagatccatcagagaaatcactatctatggcagctatatccttataaaatatattgcttgaataataagacttgaaagttaatattactccttattccatgggctgcagaataaacgttgcgttgacaggcatgaaaacattaatctccttgtatatcttcatcagaactcttgggtgaccaggtgcattgtcaatgagcagtaatattttcaaaagagtcttttcttcttagcagtagatctcaacagtgggcttaaaatattcagtaaatatggctggttgtggtgactcatgcctgtaatcccagcactttgggaggctgaggtgggcggatcacgaggtcaggtgatcacgacaatcctggctaacaccgtgaaacccatctctactaaaaatacaaaaaattagctgggcatggtggcatgcacctgtaatcccagctacccaggagactgaggcaggagagtcacttgaatctgggaggcggaggttgcagtgagccaagatcgcgccactgcactccagcctgggcaacagagtgagactccatctcaaaaaaaaaaaaaaaaggaaatgtttggtggccaggtgcagtggctcatgcctgtaatcctaacactttgggagaccaaggcagatcacttgaggtcaggagttcgagaccagcctggccaacatggtgaaacccccgtctttactaaaaatataaaaattagtcgggcatggtggcatgcacctgtagttccatttactggggaggctgaggccgaagaatcccttgaacccaggaggtggaggttgcagcgagctgagatcacgtcactgcactccagcctgggcgatagagcgagactctgtcaaaaaaaaaaaaaaaaagaaaggaagaaagaaagaaaaaaaggaaaaagaaagaaaaagtttgaaatatcgcaagaattaccaaaatgtgacacagacatgaagtgagcacttgctgttggaaacatgaggctgatagacttacttgatggagggttgctatagaccttcagtttgtaaaattgcactatctatctgcaaaatacagtaaagtgaaatgcaataaaacaaggtatgcctgtaaaagcatttttataaaaaacgaactgtccacaattttagtgttcaatgtccatctagttgccaacataaagaaatggcatcacatttcacgtgttatgtctagatccaatttatccaaacctaggagcaatatgaggtttttactattgcaaaatttagtttaatttaattttttaaatttttgtagagacagagtctcagtatgtttcccgagcttgtctggagctcctgggctcaaacagtcctcatgccttggcgtcccaaagtgctgggattacgagtgtgagctaccacgcatagccgcaaaatattctttagaactgtgacaaatattgcactgatttgggagtacctccagaatcaggaactggacaatcaatacaagtgggaaaatgtggccggtcatggtagctcacgcctgtaattccagcactttgggaggccgaggtgggcagatcacctgaggtcaggagttcaagaccagcctggccaacatggtgaaaccccatctctactaaaaatacaaaattagctggacgtggtggcgcaggcctgtaatcccatctacttgggaggctgaggcaggagaattgcttaaacccaggaggcggaggttgcggtgagccgagattgcgccattgcactccagcctgggcaacaagagcaaaactctgtctcaaaaaaaaaaaaaaaaagtagccgggcatggtagcaggcacctgtaatctcagcaacttgggaggctgaggcaggagaattgcttgaaaccgggtg[136 bp omitted]ctgaaagtaggaattgacaagctaattaattagtcctttttgttaccaagcacctctgctgctcaaattcttcctgtatcttgagtcactgcttgcctctgaagaacccacaaatctagatagcatccagacactgtcatctttgattttgaagacacagggcaagtgatgtggagaagcctttctctggggcctgaacagtgtgagtcagaaatgccagtgttgaaggctctagattgtgctgcattatcactgttcaccagatccaagcaacataaatgcctgttgttctttttttattttttatttttttgagacggagtcttgctctttcatccaggctggagtgcagtggcgcgatctcggctcactgtaagctccgcctctcgggttcacgccatcctcctgcctc[219 bp omitted]aggccctaatagacttgtttgacaacatttctttggtctctgaatacaactgccatatttcttgttctcctaaggctctaataatgaccaaagaaccctagttcattttcttttttttttttttgagacggagtcttgctctgtcacccaggctggagtgcagtggcatgatctcagctcactgcaacctccacctcctgggttcaagcgattcttctgcctcagcctcccaaggagctgggactacaggcacatgccactatgcctgactaatttttgtatttttggtagagacggggtttcactatattagcaaggctggtcttgaactcctgacctcaggtgatccgcccacctcagcttcccaaagtgctgggattacaggcatgagccacgacgcctggcctcattttcttttttttgagacagaagtctcgctctgttgcccaggctggagtgcagtggtgccatcttggctcactgcaacctctgcctcttgagttcaagcaattctcatgtcttagcctcccaaatacctgggattacaggcatgcaccaccacgcccagccaatttttgtatttttagtagagaagaggtttcaccatattggccaggctggtctcgaactcctgacctcaggtgatccacccagcttggcctcccaaagagctgggattacaggcatgagccaccatgcccgggccctagttcattctctaagattatagccaaccatttcctgggacatgggaagtccttccaccttcccatgtactctccttttggaggaatgagtttgatagcaagggaggcctacaccacagcccagtattgtggtaacaggtgcaatctaaaagaaatgtgacacaaactcaaaggttttgcctgtgaattaattcagttcacatttcctaagagtttactatatactgactcctggggtaagtactgtaaactgtcgtgtcaatgagtgacagaaaacacacggggccaatagagagacacagaggaggggcacttggccagctcaagtactggaaggttccctatccagtgttccctacctgaccagtgaggctcacggagtaacacagggcatcagcacacaaaaggcagaggatgagattctagcaggaaaacgctaccctggccaccagtccccagaaaggaagggttgaaaattaatggccacattgcacttagtcaggctgcaatattaataacctgtgctgtgcctgcttcagcagcagatatactaaaattggaacgatacagagaaaattagcatgacccctgtgcaaggatgacacgcaaatttgtgaagtgctccatatataaaggtagtaacaatactagctgttgtgctgaaggcgcctttgtggagaagttttctggagtagcaggagacttatttttaatgattatttctccagcaccaggctctattggtgccgtggacatagtgatgagcaaaatatagcagtcctgccttcattgaggtaagctcctagaacagagacagtggagaatcaattaaacagataataatccatgctatgaagaaaaatgtggcagggcgccaaggctcacgcctgtaatcccaggactttgggaggccgaggcaggaagatcgcttgagtccaggagtttgagactagcctggccaacacagtaagaccctatctgtacataaaattttaaaaattggttgggtgtggtggctcgtgcctgtggtcccagttgctggggaggctgaggcaggaggattgcttgagctgaggagttggaggctgcagtgagctataattgaaccattgcactccagcctgggcgagagagtgggactctgtctaaataaataaataaacaaataaaaatgaagcatagagtaagagctgtggtcagggaaggcctctctgaggaagtgaccaggtaaaaggaggaagtaagccatgagaaatttataaaggctgggaaatgtataaagaaaagaggtttaatttgctcatggttctgcagaccgtacaggaccaccatgactcaggtggcttacagtcatggcgtaaggcaaaggggaacaggcgcatcacatgcagaaagcaggagtgagagaagggggaggtcccagactctta[131 bp omitted]gcctcccgagcagctgtgactataggtgcctgccaccatgcctggctaatttttgtatttttagtagagacagggtttcgccatgttgcccaggctggcctcgaactcctgacctcaggtgatctgcccacctcggcctcccaaagtgctgtgattacaggcgtgagccactgtgcctggccaaaacatgtgttttgaggcccctagtttgctattgtcctggacatactagcgttcttactgattttaaaaggggtataaatgatttggtgtgtcttgataggtctcattctattttgcttcaaaggccacaagctataattatcattgatttttgttctgttgaaaatgtctttgtcaatattcccggagatatacagcttgtgaaaatcgtccaagatgaaaagaatgtctgcccccttgatatttgcttagggagtgaggataatgatctctttgcaactgatattctgcttcagaatatcatttctacccaaatcagaccaaaaaatcatttgtttttttcttcaggctttccatctgggctctttgtacccacctctttttctatgagacgatttgccagtagaatactccatttcaacaaacaggtctatggaaagaagcaaactaattacatgcagcttcttttatgcttgtggcccagatttaagagttccagaccagcctgggaaacagatttagaaatggaatcaagtattgacagtgctgtgattgctgaaggcggtctacctctccaccagcactgcccatatgctggcagggttcgaaaaccttgtctgagttgaggaacaagaagagggcacccccaggccatctcccatgacctttggaaggtgcagaaaagcctcgatgtctccataggaggaagcacaaagttgagaggaagggcagggctcacacgctgtccaggtggcctctgaagcaaataatagggccctccctctggagattggaaagtggatttcctggtggggccagggaagactaggctgggttttctgagcagggcttcgttaaagaggggacaccatctatgcagagtctaccctatcctcagaggtcagcagcaatagatggaaccaagtccagctggatctggggcctcctcaccttggacctatagtcagctacattaagacacctctgctgtcttcttccgtgtcctgaccacttccatttcctgctctccacacgagggcagctaggaagcgaggccttgtaaagagaggaggcagcaggtatcacagaactagaccaggcccactccccaatctcctcattctcccagcaagcagtgtgagtgcccagcttgtgctgggaagaggaggtgaagcactgtgaaccagatatgcgagtggggcttgaaacagggctggcctgagctttaccaggctaaagtgatgaatctgcccaagatattgctaagggactgaagggagttggcatagagtggaagcagtgattagaaaatagaaaatgggctgggcaccatggctcatgcctggaatcccagcactttgagaggccaaggaaggcagatcgcttgagcacaggagttcaagacaagcctgggaaacatggcaaaactccatctcttgtttttttttttttttcttttttgagacagcgtctcactccaatgcccaggctggagtgcaatggtgtgatcttggctcactgcaacctctacctcctgagttccagcgattctcctgcctcagcctctggagtagctgagattacaggtgcctgccatcatgcccggctaatttttatgtgtttagtagagatgggatttcaccacattggacaggctggccttgaactcctgacctgaagtgatctgcccacctcagcctcccaaagtgctgggattacaggggtgagcccccatgtccggccaaaaccccatctctacaaatacaaaaattagccaggcatggtggtgtgtgccttactacaggtactcgggaggctgaggtgggaggatggcttaagcccaggaggcggaggttgcagtgaaccaagatcaccccactgcactccagcctgggcaacacagccagacctcatctcaaaaaaaaaaaaaaagaaaaaagaaaaagaaaatggtttcatgttgatacctcaatgaggtgaggcttctcaagaaaacaactgcacttacactcctgtctggatacatttccccctctcctttgatgtccccagtctgcctcttctctgacactggcagttctgccctgaggccctcttctcagacagccctgcagcactttctgctacccttctgtttggaacactcagaagccaaaggtgcaacaacctgttgttgaccttttcctgcagactccccatttccttgggagctgtagcccaggaatcccgtagtggtaggagtctagccccaagactgtagatcacttaggagtttcttctgtgagaacattcacaaaaatcagagggaggattttgccagtgagtgcagccattccctgcgagtcagtaaccctctgccctgcatccatccctgcaggaaggaccggccaagaacaatcgcctccatggatgagcagccacccgcaccgcccgggacagggcaagtcctctgcggcacggtgcattcaccatgtaattagagtctgagttgttttgctgagtcaccctatgtttatcacatattttgacacttccttgacagcaagcagatgccccaaattttgtgtttgccctgctggcggttacagtaaatcaataatagtagataagaaaaacaagtaaacatctcaagccctaaaatgcaataaaatctgtcattaaaaaaaacggctaggaggaaatttgagggttatcctgcatgagccacacccagagccatgcagggaacgaagtctgcaggtcccccgctctaccttggtgtcacccaggcatctgagaaactcatccacagagtccagcccgaagttgccattccccagaatgaggagtctccagggctggaggagaggcagtcccaggatgctcagctggttgcaacccctgtccccacttgcatctcaccccaatcaatagcactatcatcaggattcacgtcccttttttttttttttttattgagacagtgtcttgctctgtcacccaggctggagtgcagtggtgtgatctcagctcattgcaacctcacctcccaggttcaagctattctccagcctcagcctcctgagtggctgggattacaggtgcctgccaccacgcccagctagtttttgtatttttagtagagacagggtttcatcatgttggccaagctggtctcaaactcctgacttcaggtgatccgcccacctcagcctcctgaaatgctgggattacaggtgtgaatcaccttgcctggcctcaggtcccatttctttcccatgcaagaaatggtgtcgagaatcaggaccaggaaatgtatatgggtgtgggcatcctgttttgtcagaaagcaacgaaattatcaaagacaaatttgttccaagttcacagatcctattaaataactggcctgtactcttaggaaatgtcaaggtcacaaaagacaaagagactgaggagctattccacattaagtgacactatagagacagaggtaaatgcagtgtttaatcatggattagatcctggaacagacttttttttttttttacattaaaaacattgtcggtcaactggcaaagtatgaatacactcatagattaaataatagaattgtatgaatataagtttcctaatattgatcattgctcgcgattatttaacagtatgttctgttctttactacaatatttacaggaaaaggacactgtgattcattctcaagtggctaaaacgatatatatatgtatgcctatatatgagagagaaaaataattaaacaaatgtggtaaaatgctaactactggggaatccgggtgaagggcagatgggagtctgttgtactagccttgcaacttttctgtaagtcttatttcaaactaaagaaaaattaccaaaggaggctgagcgtggtggcttacgcctgtaatcccagcacttgggaggctgaggcaggcggatcacctgaggtcaggagttcgagaccagcctagccaacatggtgaaaccccatctctactaaaaatacaaaaattagctgggtgtggtggtacatgcctgtaatctcagctactcaggaggccaaggcaggagaattgcttgaacctgggaggtgaactttgcagtaagctgagatcgtgccattgcactccagcctgggtgacagagtgagactccaattcaaaaaaaaaaaaaaaaatccaaaggaaaaagaagttcccaggagccaacacaaaagctcccctttccatacaaactatattttagtgaaaccacataaccaatgagggaaagttctttatagaatttatacagttcattgcaagaggaataatagaatcagaaaaccatcattttacgaactcctacgacaatgatcataaatgaacactaagaccttgaggcagaagctcaggttgatggagggaacaggctgacttcattggccaatcccagtgtcatcaaacttggggtgacagatatagccctgggaagaattctggtcacaaatttgaatgcatttgcatacagtccagcctttagagctcagcgcaggaagtgcatcgcataccccctcagccaaatccaggtgaatattctgtaagacctggcttctctagcaaatcaatgtcagtttttaaaaaagatgagaagacttagctgggcgcggtggctcacgtctgtaatcccagcactttgggaggctgaggtgggcggatcacctctggtcaggagttcgagaccagcctgaccaacatgaagaaatcccatctctactaaaaatacaaaattagccgggcatggtggtgcgtgcctgtaatcccagctactcgggaaggctgaggcaggagaatcgcttgaacccggtaggcggaggttgcggtgagctgagatcgcaccattgcactccagcctgggcgacaagagcaaaactccgtctcaaaaaaaaaaaaaaaaaaaaaaaagatgaggagactgttgtggaataaaagagacttgggggcacaactaattgcagtgggtggctcttgtttggattctgatttgaacaaaccaactaatttcttattttttaaattaaaaattttttttttcagactgtctcactctgtcacccaggctggagtgcagtggtgcagtctcagctcactgcaacctctgcctcccacgttcaggcgatacttatgccccagactcccaagtagctgggactacaggcacgcgccaccatacctggctaatttttgtatttttaatagaggcagggttttgccatgctgcccaggctggtctcgaactcctgagctcaagtgctgggattacaggtgtaaaccactgcgccctaaaccaagcaatttcaataatcggatattaaataacattaaggaattattacatgtattaaaggtgacagtgatatggtgattatgtttttttaaaatgttcttattttagaaacagggtctcactctgtcacccaggttggagtgcaatggcttaatcatagctcactgcagcctcaaactcttgggctgaaacaatccttccccctcagcctcctgaatagctggaactacagcaacgccacaacgtccagctaaattgtttattttttgtagagatgaagtctcacttcattacccaggctggtctcaaactcctctgctcaagtg[132 bp omitted]acctccacctcccgggttcaagcgattctcctgcctcagcctcccgagtagctgagattacaggcctgtgccaccacgcctggctaatttttgcagtttttagtagagatggggttgcatcatgttggccagatcttgaactcctaacctcaagtgatttgcgtgccttggccccccaaagtgctgggattacaggcatgagccactgcgcccagtctaaattctcttatttccaaacacgaattcgttcccttttttcccaccagtcaaggctttagaaaatacggctgtcatgtccttcttgtccttgcctggtggtctggtgtctgctttgacccccaccaccccgccaaacctcatcacctgcccttcaacaaaaagtaactcaatatgtggccaagacctccagcttatatagcatggtcaaaaaagaccaataaagttgtaggtaagagataggacaaaagtaagtggctgtaggcttttaagggtgggaaactgggagaacactaaaggaggaaggaaggtttgtagattcctctggtgccctctctgggctggtaagtctcgagtggtctccagtaaagcagaatttctatgcctgcctttaggcaaaaaaggggaagggtagagaaagcttttcctgtgtttgctgcttttgtttttgtttttgtttggagatggagtctcactctgtcgcccaggctggaatgcagtggcgccatctcggctcaccgcaaactccacctcctgggttcaagtgattctcctgcctcagcctcccgagtacctaggattacaggtgcccaccaccacgaccagctaaattttttgtatttttagtagggatggggtttcaccatgttgaccaggctggtctcgaactcctgacctcgggtgatccacctgcctcagcctcccaaaatgctgggattacaggcgtgagccaccacacccagcctgtttgctatttttaaattgcctttagctcaaaataatttttatgccacagtggcatattttggggcataatattctggtttcttacacttgcaagtgtcgttcccaagtgcatgccccactaaactgcttgtgcacaaatctccataggacctgtttccaggtgactcaagctcaggcaatcagtcccaggagtggtcctaacaaacagactctaacatgggatttgaagctggatcaccctctgacagtgaggaccccatcactaacctatgtagggtactgatagcccaaagttgtcaaaactttccctgaaggtagcctggatggaatcatggtggaacagaaccgactatctccaaggcctccaacaggagagggtcattttatacctccttatgcgccagtgtggagtggaagagtcaggacacattccagggtagggggagaggacacggtacccttgaaatttgtttattttgatgactgaaggaagacaggatttatattctcagggcaaaaagttcaaacattagagataaagctaaagccttttccttctctccctccttccctcctttcttttcttttctttcttctttctttttcttctttttgagacagggtcttattctgtttcccaagctggagtgcagtagtgcaaacagggctcactgcagcctcaacctcctgggctcaagggattctcgcacctcagccccctgagtagctgagactataggtgtgcaccaccacacctggctaatttttaaatttttctttaatttttactttatttatttatttatttatttattcgtatagagataaggtcttgctatgttacccaggctgtttttgagctcctgagctcaagtgatactcccatctcagcctcccaaagtgctgggattacaggcatgagctactgaatctggccttctgatttttctgtagagacgagtctcaccatgttgctgaggctggtctcaaactcatggattcaatcaatcctcccacttttgttgcggtaaactgaggaacggagagaccaatatggcctcccaaagtttaaagtctttctttactatcacacttgtctttaagggcggaggggagagcctttcttggcaaccatttcaaccccactgttagtagtatgttatatacccctctctatagaactctctaggtaatatttatgagggtgtaacataaatgagatcatattacaccactgctgtgcaattgcttgttttacttaaccatgtgtcttttttctttttcttttcttttctttttttttttttgagacagagtcttgctctgtcgcccaggctggggtgcagtggcacgatctcagctcactgcaacctccgtctcctgggttcaagagattctcctgcctcagcctcctgagtagctggacttacaggcacccgccaccacacccagctaatttttgtatttttagtagagatggggtttcaccatgttagctaggctgctctcaaactcctgacctttggatctgcccacctcggcctcccatagtgctgggattacaagcatgagccattgcgcccggccgaccatgtgtcttaaggatctttccttgtaggtaggtagcatggcttcatcccttttaactgctgctaactgctgcataatagcctgtaagttaggctgttcccaatttttcttatcacacagatgttgttgtaaacatccctggacatatttccgtggactccaaaatgtttctctagggcagatatatgtaggattattccatcatagcgtatcttgtttacattttaataaattatataaaattgcttgaccatttattaaagttaatacaattttaataattatatcatattactattagcagagtgtaatatgactttccctatacccttgacaaaatatgacattatcaacctttcaatattttggtgctctggtagtttaagaatttttttaaaagattattgctttcatttgcatttgtctgattactgaggttgagcatcttttttcatatttattgaccacttgcttcaatgaattttcataccctttgctatgttcttttctttctctgcaatttaaaatagaaaataaaacacccaggtaaacaaaacctagacattcttgtgtgtgtataatttttttttcccgttgtgataaactgcaactgcagtttctcaaatgccttcaacctgaaataatcaatttactaaatctgcatttttcttttttgagacagggtctcgctctgtcactcaagctggagtgcaactgatcatggctcactgcagctgtgtcctcctgggctcaagcaatccttccacttcagccttcccaggtagctgacactacaagcacgcgccaccacgctcagctaatttaaaaaaaaatttttttttgtagatttggggtccctctattgctcaggctggttttgaactcctgggctcaagtaatcctaccacttcagcctcccaaagtcttgggattacaggcatgagccctgcacctggccccaatctgcatattttcaggttgatcatccttaattccttcagtggctaacatacattcacattgttgtgcaaccattgccaccatccatctccagaactttttcatcttccccaactgaa[132 bp omitted]tgaaaccccatctctactaaaaatacaaaaattagccaggcgtgttggcacgtgcctggaatcccagctactctggagcttgaggcacgagaatggcttgaacgcgggaggcggggattgcagtgaaccgagatcacaccactgcactccagcctgggcaacagagcaagactgtgtctcaaaaaaaaaaaaaaaaaaaggataataactctccagtttcccctcctctcaacccctgacaatcaccctttaactttctgtctgtatgaatttgtccagtctagataccttgtatgagtggaatcacagaatatctgtcctcttgtgtctggtttatgtcgctgagcgtaagatgagggctgcttgctttttggcatgtccaaagccttgtgggttgtggaggatccactggcctgatacctctaggaagtgggcagttgtcccaaccgggccatgctccagggacccctcactcccagctgtgcagcccccgtggagggggcagtcctcttcagtatgcctggacaggggttcccttcttcatgcctctcaaggactcctcagggtggaagcagtacagcctcaaagctaagagcccccagttctgcaccaggcagagtggatttgaatgcctcctgcttcttattcactaagttgggctagttacttagcttctctgtgcttggattttctcacctgtaaaatgcagaggtcgggtgtggtggttcataactgtaatcgcagcactttgggaggccgaggtgggagaatgacttgagccaaggagactgaggctgccgtgagctgtgatgacgccactgaactgtagcctgggcggtagaacaaggtcctgcctacaaaaaaaaaaaaaaaggcagatgccagcactaataatcatagtggatactttgctgtgctacccttatctctcattaggaatgaaggatctttaaggatctttcccccagttcttggagtgctgctgccgtcaaaaagcctccactgtcatcatgtatgggggtgggggtgctacttcactggggagagtagcttcacaactactccccacagtgtctgctcagcctctactgagactgcatcacagctctccctcctccctgcgctgagtcctctccctttcctcctcctcctgcaggtcttgacctgggagcacccctaacaaacctcttacgtgccgacctccacctccattggcttcctggagactcaacctgccacgtatcatgtttctcacaaggactaaattgcatagaacataaagttctaagctgggcgctgtggctcacgcctgtaatcccaacactttgggaggcagaggtggacagatcacttgagggcaggagttcgagaccagcctggccaacatggtgaaaccctgtttctactaaaaatacaaaaattagccaggcatgcctgtaatcccagctatttgggaagaggatgcatgaaaattgtttgaatcctggaaggcagaggttgcagtgagccaagattgcaccactgcactccagcctgggcgacagagagagacttcatctcaaaaaaaaaaaaagaacataaaagtttttatcccagagctagacacagcgaacaataaacattagttggtatcattatactttcttttctctaatggttacaaatgaaaaaataaataaaattcctctcaaaaggccaaagggggctgggtatgatgactcatgcctgtaatcctagcactttgggaggtgaaggcagaaggatcacttgaggtcaggagtttgagaccagcctggccaacacagtgaaaccctgtctctacaaaaaatacaaaaattagccgggtgtggtggcacgtgcctgtaatcccagctaccaaggaggctgaggctggagaatcgcttgaacccgggaggcggaggttgcagtgaggggagatcacaccactgcactccagcctgggtgacagagcgagactctatttcaaaacaaaaacaaaaagtcccaaggagagaccacaatatgtgctcatggtgccattctgactgggatcttttatcttcaatgctatatatatatacataggtatatacatgctttattgagatataattaacataccatacaattcatctatttaaagcatacaattcaatggctttttgtacattcagagttgtgcaaccatcactaatcattttagaacattttcattacgtgtcctcccccaccaaaaacccctgtacccatcagcagtcacttctcttccctcctccccacccccagcctctggcaaccataaatctactttctgtctctatagatttggctatcctggacatttcatgtaaatggaatcatacactatgtggtctttgtgtctgacttctgtcacttagcgtgatgttttcagagttcatccaagttgcagaatgtatcagtacttcattccttgttactgttgaatattccgtgatgtggatagatcacattttgtttatccatgcatccagttgatggatgttctttccaccttttagcttttttttttttgagacagagcctccatctgtcacccaggctggagtgcggcggcgcaattttggctcactgcaacctctgcctcctgggttcaagtgattctcctgcttcagtctctgcagtggctgggattacgggcataccatcacgcccagctagttttatttttatttttgtatttttgtatttttttagtagagaaggagtttcatcacgttggccaggctggtcttgaactccttacctcaggtgatctgcccaccttggcctcccaaagtgctgggatgacaggcgtgaaccactgcacctgaccaccttttagctattatttccgctttttggctatcatgaataatgctgctccaagcatccatgtacaagtttttacgtggacatatgttttcataggcatatgcctaagagtacgtacatattctttcggttatacacctaagaacggaatcgctgcgtcatttggtatcactttaatattgggagaaactgccagttttccaaagcagctgcaccattttgcatttccatgaagagtgtgtgagggttccaattcctccacttccccaccacttgttattatctgtcttttttattatagccatcctcgtgatgtaaagcggtgtcttgttgttgcagtttttgatttgcatttgattgacatgttgagcatcttttcatgtgcttataggttatttgtgtatcttttctgggaaaatgtctatttagatcttttgcttatttattgagtcttattcaatgttttgagttttgttttcttcatctgtaaaagaatgttacagccttcatagagcagtgattaatgagaacatttatttgcaaggcacacagcacagtgctctgcagggcacttggcatgcactccaaaaagttatcaaaacttcctgtcaccttgccttgcaagtagaaaccaagtggagttcgttctgcattacgtcacctaccatagtgttttgcatgaagacaggctcaataaatgtctgagagtaaatggaccaattcacaacattcaatattcaaatctgaatcctctgtgctttgccccctttctcccatttctctcattgaaccttttcttcctggaacaattttcttaattttattccccttgccagctgcctcctcttctgaaatttaacttgcagtatcattgaagctgagtacaaagagaaccaaagacaccacctgtggcagtcccgaggtgaatgtgataaaccattgaaggagctgagcgtctgacagcctgtgagcatagcctgtcccatcttagtaagagccacaaaaagtaattaaagtactgaaaagaatgagaaaagggagattttcaaaaacgctgattgcagactgagttatttaacacggttcagcaaccgtggtctgaggaattttcacttgtagaggactcaggccgccatcaggcccgaagagtccaggttggtggggccactccccgcggtgtggagcctgcagggggccacgactgggtgcagaaaaggaatgtgatcattcagccgagtggtaagtccaacccatttcacgcgcactcagcctgcactctacgtgctctggtaaagcccagctgaggtgcctggggcaggacttgaaagggcaagcacaggtgagggaaggtgtgactgtcagcccagtaccagacaccacggtgagatgtgaagctgggtgtgtacggaactgctggttttaccttaggcctgggacaatagggaatgtgaaaagcaagggtgtgtgtgtgtgtgtgtgtgtgtgtcttggcgccagctgcagtaccgccgtctgaaaccccctgaaaccctgggccaccctctgaatctgctgctcgagggcaagcctgggagcgtcagggggaggaaggtggagacacaggtgtcccagagggcagggactggtttcagctcatcttggtattcccgggcccagcttggtgcccaaggaccgttcgtggagctcatgaaatgctcccccaggcccggcacggtggctcacgcctgtaatcccaggccgggctgggccgcattctcattggacgatggcctttgtcaatcactgagggaaatagatcttgagtgtggccggacatccggggctttccaccctcggcgtggggcgggcttgaggtggggaagatggaaggatgcgatacccaatggggatcaaggcctttggcttcgcggcagattggcaggtgcttgaaccactgaaatgccgcagagggataccggcgctatggcagtgattggttcacttcgcgggtgggtggttttctccgtgcgttggtccctacagtagataaaacgggcacagtagctaaaattaacgcctaagtaaaaccgctgccggtgagttttgggagtattttcgcttttttgaaagttagtattttggctctcacaaagcctcctgattttagtaggctttccctggaatgacccagattccttttcgttaccttagttaaggcaccccctccccgtgcagggtcagggttggaaaactaccgcgctgagcccaaattaccgcgaagatcgtcggaaatgtgcgcaactcagctaaagcggagatttaatggatggtattcagtagaaaatgggacaagacatgaatggacagtttacaggaaaaaaaaatgcaaggggcccctaaacatttaagtgggtgctcagcctttttcataatcagaagaatgcaaacgaaaacctcactgagctaaggcttctgatccatcagattgtcaaaaatccaaaagtttaacaagcgaggtacgctgttaaggacaatacaggaacctgatctgtcctgcattgttgggagggagtgcaaatttacctttgacccgcaatccacctctagaatctactctgaaagtaaacttgcacaaatatgaaaacagcatacgcgcaaggttttatttgtagtggcactgtatgaatttgcaagactggaaaccatgcagatgtccatgagagggggagtggctgagtaaactggtacatccgggctggtactacagcccagctgactctgtggcgttaagaaaaatgaggaaaactacaatattttctatggcgtgatttgtctccagagatgatgtatattggctgctaccgttagcaaaaagaagcactgaaacgataaaaccaaaactgataaaattgatagcgtaaatggtggagaatccggtggaagccctagaggggttccaccaaaagaaaaataaggtgacaataataatagtaaaaagaatctgtggcagtaggaatctgccaggcttcctgttctggaacccagcactagacccggaaaggcatgtttggctgggtgggcctcaagttacttataattggtggccatgctatagcctgagtgaaggatttctggtaccctgccgctctccaaaaagacgtctctttgggaactctagaactggaatggtccatcagcacctgccttttggcagagagggcaggcctttgtaccccactagtgacttggtttggaggtgggctgcccccagaacaggatgtaatcttgggcaaggcagctgctgtcaggctgggcacaacctccccctcaaggctgtgaggagggaagaaaggaaacaacttctactttctttaaagtaggaaacctcctcatctgccacctctcctgcagtgagaagtagagactagacgtggatactcccacataggatactggggcctaatggatgactgtgggcctccaccaggcgcaggtgaccctgcagatatgattcagaggcagcctctcgctgctgttcatcagcagcctgattccatgtggactatactgttgctttcagaaatcatggtctgcctggacctagccaggctcactgttgaagtcttgttgtgtgctcttccttccaggcccagagagctgcccagtagatcaacttgggctttctatcaggctctaagtacaggcaggtccttaggacaaattagaataaaacaatctcagagtgatctggtcttagtataattacttacattttcaaattaaaaaaaaaaaaggaaaaccagtaacaaatcagccacggcagagaggggtactgggagttgatagaaaatttgtcctcagttgtaggttactcttaaagcagcttagattgcatgttttcttcagggtcattggaaaaggtggttaccgtcagtccaggaagtggggagccagctaattgtatccagatggaggtacagtggacgctttgagggaaggaggccctgaaacgtctctagcaagcaggctttggtaaacagaactgcagatactgatgagtgacagtccactgctatttgtgtcatgtaggcaggccagcctggggcagggttctcagcagtgatggagggcaggggagagatgtaaaggctttgagactggttcccatcgctggaaagaggctctgtgcagctgaatgctttaggttctctcaacccccacacccagagagagttccattgggattggcttctgtaggcctctgtggctcttaggttcttggtggcagtgacatacatactggtgattctctgacatggctgccaggtagacatctttctctcggtgtttgcgctctttctcccacactgctgtttctttctgccctcctttatgctttttagcttagatttggttcattcactgaaatgaatctctgtgagctgatgagaacaatctcagatgaggtagcagaaatggtgtcaacagaggccagcacttacggggaatagataggagccacccaacaccacagcaaatcagcagtgtttccatgaagtgtccaaggccaggggtggggcctgggcggtggacacccaccaccgaggaagaggaggatgctgagcacttcagacactggcttccgagtgcccaccaagccctgtcctggacctcataggaaacccaactggaacaggtgtctccccaacacccatgctcccttttatcacagatccccagtgaaattcagttaccttctcctccagatggccatgtattcaggggatgctgggcccagccccaggctccaggggtctaggccaatcatgctggtcccatgtccttgcccatgattggttgaaacatgggcacgtgccatattctggccaattgggatctgaagggatgtggggcggggacatctggaccagttcccttacgcctagagacgcaagcaagacatgcccttttcttgcttctggatgagatacctgaactcctgcagccatcttgccaccatgaggagagctagtctccaataaaagcccacagtacgaggaagactgagctaagagaactgcagcttgagctccgaccattctgggcctggagttgttctaactcttggcttctcacgtgagagagccctgttcttgtttaagccagttgagctggagttttctgtcgttgcagtcagaacatcttagctggtacaagtgtacaaaaattccttcagtttacttttcccaatgccatcaggattttgactcaagtacacgagtcattcctgtttggtataatcagaaaagaaaggagagggagaagaaagtgggcaatggaaacacaggagctttgcagtgcagccttgggagggataagggcacctacgggtttgccctgcccaccgatgtgcatttaggggacagag[137 bp omitted]tccgccttctgagttcaagcgattctcctgcctcagtctcctgagtagctgggattacaggcgtgcgctaccacgcctggctaatttttgtatttgtagtagagacagggttttgccatattggccaggctggtcttgaactcctgacctcaagtgaacagagaattcttaaatcataacatggttaaatgcttttgacaaaacacattaaaacaatttcaagaaggaaaaaagcactgaccacaaaaagaaagaaaaacactcgtatttggatccaacaacagacacagagagtgaatggtcagcaagaaacaaaaggaatcagagtggaacagagaggggctcccgaaaaacccctggcaggcaagaggcgacggcgggaagttaacctcatgatggtgagcatgaggcatggaaatgccactgctccactttttttttaaggtagtgtgttgattgagctttatttcagcaaacaaaaaatatttctaagaacttgcataggttctgtcgttagcataccctccctaactcagtttgctcaagaactgtgaattgtcctgccagtggggtgatcagaaatgggacctgcatggtatgaggaccagttatccccatcattgtatgttcactcacaaagacagaacaatcccctccggtgtcacaggcactgttctgtaagatcactttggcattttattgaatactttctggtgaggttctctttccctgcacacaggcttttcttccctaaaggcctctaacctgctggaagatagggaccaagttgagtattttatttcttctgtctacagcatccagcatagttctaattaaatacaattaggcaagtactcaaataagtcttgcctaattatatttaaagtaagtatcctgcttaagtgagagaaattcttggcagatcttacctctagtactattgtttagtgccaggatggaaggtgagtctctgaattagactttttgctgaaagaacgctcccagctgggcatggtggctcacgcctgtaatcctagcactttgggaggccgaggcaggtggatcacctgaggtcaggagttcgagaccagcctggccaacatggtgaaactccatctctactaaaaatacagaaattagctgggtatggtggtgcatgcctgtaatcccagctactagggaggctgaggcaggagaatcacttgaacccagaaggtgaagggcacagtgaccaggcgccagagtgagactctgtctcaaaaagaaaaagaaaaaaacgctctcctttagctggatgtagtggtacacacctgtagtcccagttactcaggctgagaggaggattttgtgcgcctgggaggtcaaggctgcagtgagtcatgatggcaccactgcactccagcctgggtgacagtgagacctcgtctcaaaaacaaaaacaaaacaaaaaaaccatgctcccctacagctttcttccctacagttacagaagcttccagaaatcctcgtaaggcagaataagagtgtagtattggccgggcatggtggctcacgcgtgtaatcccagcactttgggaggccaaggtgggcggatcacctgaggtcaggagttcgagacgagcctggccagcatggcaaaacgctgtctctactgaaaatacaaaattagccaggtgtgatggtgcatgcctgcaatcccagctactcgggaggctgaggcaggagagtcgcttgaatcagggaggtggaggttgcagtgagccaagatcacgccactgcactccagcctgggagacagagtgagactccatctcaaacaaacaaaaaaagatttggatcaggagagggcctcagagcccaataacagctggaacctcaccagcaagcagaaaccagaggggtcagggactttgtcttctgaataaaacaattttgattcctgcaaagtaatatacacactgcaagaactcggcaagtacctatagaatgtacgcctgcatctatgtttataagggaaaattaggcctacagaagtctggaaagaacaagggcatggggcaagggtggggacagcatcaggcatggccgctgtgcatcccgtgggcgcagtctacatgtcgtagagccggagctgctcctgcacgtcgccgtcggacatctcgccaaacgtctccttgttgtctttcatgagcttgaagatggcagccagctgttccttctgaactctgtcgagaagaaaggacaaagaggaagaaggtgctcctagcccactggggagagagggagcctgtgtgcagccggcggagttgggactctcctctctcttgtgtgactgcggttgcttttcagaacaagaagaaaatgaaaataaaacccacttagaacatcggagctggttgggtctgacacacgcaacttttgagggctctaaaaactgggatgcgaaatctcaggtttgccggggaggtttggggaccccaggtatcacttaggtgctctgtgcctcagtttccctttgggcctcatttgattgttgactgcatgtcccacagtgatgtaatgaggaagaagataggctccatgaagcagcttgaggtagtgctatgaagaagtaggttagaaacagccttcgttgagaggaatgagccgaaagtggagaaagaaaaaacattatcagctgggaaatcagggagcatacaagtgtgtgcaagacggtgcttggcaaaggagcggggagggaagcctgtggggtttcactggccagagaaaggggggtgccttttcctaatttgcacaagataccctatggcaggtggcggccctgccccttttatcaagggatgggtgtggaggaagactggcctaaatgtttgctccacgcgggttctgtgctgggagcaatgtcttgttatctttatgaggctcagctacaccatctgaccagcacaggacaacttctgcagcacaaacacctcaggtggggcgaggcggctgccgaacccagggagccatatgtttgttgtttgctccactctggtgccctgtgctcctcagcccagccgggcactgcatcctggctgcatctcactcttctggtttctgcagttcctgccccccacacaccacgggctcagtgccttcagagaacgtaaaccacatcacagtgtcggacctctcagccctgctctgcagctgggtcggctgtaagcacgttacaggctctgcaaccgcaggacctcagcatagccctgggccactggcatcccccacactgcctggaggggtggtctccacgttcgctcccatacttttgctaccatattcctttgcttcacccttccctcctctcctcagccccgcatcttccatcctgcaaaattttctgtctagagcagcatctagtagttgaaatactgaagtcccacttcccagcctcccttgtcccctgggaaagctgtgtctacagtcggttcccctgtctggtgaagcagcagcctatgatgtgtgctttgtgccctcctgtaagaagaaagagggtcaggtgcagtggctcatgcctgtaatcctagaactttaggaggccaagatgggaagatcacttgagcccaggagttcaagaccagcctgagcaacatagtcagactctgtctctataaaacaattagccaggtgtggtggtgagcacctgtagtcccagctacctgggaggctgagacgggaggatcacttaagcccacgaggtccaggccacagtgagctgtgattgcaccactgcactccagcttgggcaacagagggaggccctgtctcaaaaaaaaaaaaaaaaagaagaagaagaggaattcccgtgaacagaaaggatgtgctgagctctgtggatggaagcacaatccatatgtccctgagtgaacacagatcatgtcatgtggttttgacagccatggtgactgcatattttttaacagggtggatgtatggctttgtactctgctgcagagtaagaggcatcaaaatgaaagaaaggtcaaacttcaatgggttcaaaagggattttgttttaaaacaaagcaaactgaaaaaacacacagtaattgagatcatctactcaaagtttattggactgaacaaaggctgaatacagagatccaagccatgaggagtacatgaggtgtggtgcctataagccagggtcggaaactttccagacaaacctagatagctctactaggagggagtcaacgacctattgtgtcaattagatcccagcctggacaagggcatgactattgctgtttggggacacgtggctctgtgttgaaggcaatgactgtgtggctgttgccatgtggcctgttctcccctaagccctgaaccaaaggttccaggcccagatgagaaggcccctgggaatgcatgccataggggttgatgctggacattccccagccttccattaaatgaaaacattttctataaacttactgctttaaaaaaatgttttaaccaacaaacctaagaactgcaaatgagtttggtatagtataaatattgtcaaatataaaattccaagaaacccatttgagactgatctgatgatctgaagttctaactaatctatcaaactttctaagaaaaggcataggtcaagaaatctttttaaagcaaacattattgcttctgctatagcagagtggagatttggctgagctggtaagaacctcagtgaaaaggtgtcttagcaatgaaagggctgaatccgagattcctctagatgaaaaataaggggaatggtcaagtaaattcctggtactggttctttgctgccctgtaatcaatatggcatctcacccccgacaaccaagccagccacagagagaagtggggttcccagggaaaggggtcggctgaccaccctgacggagctggtgagcacaggtgagctctacctcatttgtctctcattcctcaaagtcttctgtggtttggcttcagtgagggcaaaagaggggagactggagtgaaagtgaactctgcttttaaaatgttctttttatctaaggtgtgcagggtgtgtggatagcaagtttgagtggtaagaaaaatcccagtccagggtctgagctctacctcttaaaactcttcagcttaacaaagtgacccacaggaacagacatgaacatctctacacagggcagggccaaaggtgttcccaggatcctgctagccaagggacaagtcctgattgagggtctagagctcagcagatttatggaggcagcatgcaccctgggagcctgcccagactcctctctggggtttccgttttatctctcaagcttttaagatgccaaaaggaaaagcctttaggaggacgctaaggataacttcgttattcttcagttctgtaaagagaaatggggagaaaaagataatttattttactcattccatcctgcaccatgggcaaggaaagggggaaatggggacgaggaaggagaatgtttggaattgcagaagctgcgctagactctggtttctcaaaccactgctgatttgcttctcatcgcttgcagcaagacagtctgtgccgccaagccggccagagcttgcagagctccccttgatcccgcacagaacctggcagcccacagaccctgttcagcctctgcagggtacttaaggaaggaacttgggcatttgagttgccaagggcctttctgatcttgggttgtgtggttgtgctgacaatattcctatcaccctagataatttcccattcccgctggctgagttttgtcccctcgggggatactggcaccctaggatgcacgcttccagatggagccaactgcatgcccgtcttttatgaaccaagacacactgccagccctgggaccactgagaacccagcaggtctgatcttgtccctctgacgccctctcctggtggtcacagtcagcacgcatttccagcctgagctggaaattcacactggcaggtctattgtctgtagtttcttgcatacatcagatggaagaaccagaactaccccacagctggggttccttggcctcctcctccccttccctgttttaccacactagcaccttcctctagagtcatgtccatttccagaggagtcaagacagccctgcagacctcaaatggaggggtgggtcctgatctatcagagccagcccagtctatagcctgggttcattttccctctgagaccacaaggtgggaagaagtgatggagaggagctgacagccgcgcctgttctttctcctgccaagctgtgaagccagccaagccctgccagcttccctagctctgggggaggaggaggaggcctcttgctcaggggagctgtcaccagcctgcaagcccactgtcctagccacactgtgaaactggaggtggcacttcccacagcagcttcagcggaacccagggacgccaccagaggcatgaagtgtgtgaaactccggcccgaggggagagctgaggaggcgggcagacagtggcaagcaggatcttaagcagcagctgcctctggatttacagacctgaccgctttctggccccaggcggaaggaatttgatctgtgagtagttcaaggatgagactgaccacttcagcatgtcggggaactaattgggggccttctgcttccagtcccacttcctaattgtcatgagagcctgtgaactgaagctcctggggagtgctggaactggcaaccactaaagcttcaggttctagatgcagatctgttggctgagctagtaaatttaaagttaggggacgtgcagcttgtagctgcaactcgactggaccctgagagctgggaaaggcatcagaggcatggaggccgggagggtggaacctgacaggcggagagagagcaccctgctagctggcctgtggttttagtggtttgataacaacaggcatgttatttttcatactgatgattctagggcggttccctggacttggctgggaccagaactgtctcacagctgccagcgctccccacccccatgagaaccatcgtgctgaagatgaagagccaaagccaaactgaccagcctctgcaaccccaagcatcaccgtgtgaggacagcgtgatgtggagccgcggagaccccacgcagtgctgcgaggggcaaccacatgcaggggggcagaggtgtgggggagcaagcagatgccaccggcatgcctaggagccacagggagcatgcgggctgggcagtgatgggaatgaacgtgaactccagtcctgccccaagaagtcctccggcccctccttctcaattcagggcacaaagtggtaactgcagcatgcagaggagtcgaggagtcttccctcgtcccaggagcagcacctcgggcacagtctcggtcccacagaacagccaagtgtgggttggtggtctagagacctccaaagatccagtgggggaaggatgggcagcagagggtctactctctgaaaataaggggaagggattttccctccccactgccaaggtcccagctctggacgtgggtggcagtggcagtttcacccccagccggaggcctggtctttcttgttctaagaggccctccagatccatctgcctgagcagcctctgtccccagggaccttcaagggctggcagttgtgtccagccccctctagcctctgtccagggactgcaacctttttctgcaaacagccagatactacttagatttggggggctgtgtggtctctgctgcagtgactcacctcggccactgcggcacaaagaggcacagaccacaggaaaatgggtgagtgttgctactactgccacgctggattggcacaggcaggtgggggatcagatgtggcccggccgttgtctgctaacccttgccctgatcctaagaacctgcctgtctcacagcttgggagcacggaccgttctcagagtatctgctgtgcactgtgcagaagctgcctcatcttctcagggtgagacccaaggctgcagggtgacgacatccacatttccgaagcctgaggtcccagggtgacagttcccccagccttgcgagggggcgctagcaccccaacctgccggcccattaggccccctccaggaactcagggacttaactcccctccaggaacctctgcccccagacggggcctcttctgccagagattcctcgtgcttgagaagaatgagaagggctcaggtgggaaatgtattaatcggttatgaaggcgatggaggaggggaggttgaggccgcgtcagttgtttgggggcacgttagcacgcagtagaaggggagcaccactagtctaagaaatcagtgtccttaccaaaaggatttgcaagaatatttgtggctcaggacctaaggaacttgctacagggaagtgaggtcagaggtcagctcaatcctgaaatataaatgcagcaaacctggtcatgccaagcggcagcatcctcagcacctgaggactcggggctcctgccagggctcttcctcctggctgtgcttacactgcccgccccccacccacccagggtgaagagctttcctgctgagggtcgagagcgctgatgccagcagcgggaggggagacagggcctgtcaccggcagagcagctgtgaggttagagggctgcccggcgggtggcttggcatgcagccatgagagggcagttgagttctgattccaaaatcataaaccacccctcctgctcggaccctagaccgctggtttctgctgacaagtagggggtgattcccacaagctgctctgggtcgccaggcttggaaaatggcacagctaccacctagacttctgctttaaccaaaggactccaggccacgctgcagaagggcagcagtgtgggtgagcaccaggagcctgctgcgcctggtgcaaaggactgtccctctgctgagacctccccagctgtcccactgtgcccagcgcaccccttccccgcccagcaggatggtgtggagggaaaaggtggcggggtgcccagtggctgtgcagggggtgtccaaatgggaagggggagccaattccaacaacgagaagccatagctgcactgcccggagctacaaggcgctgctgcaggcgccggcctgggaggccgctgaaggatgagcaccaagaatccgctgtgtcccgaaggagaaatggagaaatcagctctgttggggactgtgtgtgtgagtgacagccaggtctgctccaggctctttcctggcatctcatttctttagatgggggcagtggggtgtggagggggtgggggggtgcagtaaatgggctctgtatcccccatcaccagtggcctccttctggtcagtgccagggaggggtgccaggggtgtgcgagcctggctgaccagggcaggaaagaactcctaaactgggaaggtggggcggtggttgggcagagcgtgtaggagccccacctcctttctgggcccttctgccaaggggcaggaacatgaagggctcagaggggcacccccctcccccaagagcccgccaggcgccagcgaaggggctgcagcctacctctgctcctcctccagctcctctttggtcatcatcttcttgtactggtttcccctcagcttcccggggctgtatttgaaggagaagccttctcctgtggaggggggacccagtaagtgccaggagtgctgtagaggctggccccacaaaccccggccccctttccctaggtttaaaaagaaacacctcaagcagaggccacatctggctatcagagacatctcaccccagcgcctataccccctctcgttccatagctttcccttaaatcctacaacgagacagccagagagaaagcagtcctactcctagtccacagctgtctccagatgccacatccctcccaacatctgcagtgctctgccttgccctggccctgcccagcaggtcctctcggctactgagctcagaggcgacaactccggcaagcagagcacagctcatcttgggacacacaccacgcctgcctgggcttggggaggcttgtgtcatccccccaccccctgtggctattggaaatctgaaaacacgcatccaggcagcccacagtggccaggccagggatgcgggatttgctgcagcaggtttgacgtgtgtaccgctgaagaggcagagcccgatttgccagtccccgaggggagaccccccattgctgcctgcaaaaaacggacagatctcgaggcctgaagagggcacatggatgggtaggtggtgggcacagaggaagccaggacctgtggcctggagtggacacaggctccgggcacatgagccacggtgaggagagaaaagctgagcttccagagggaaaagccccatgggggagcaacctcttggttcctgaatccagcaggtgtcgggcagagctggctggcctcttatcgacctccactaactaaaggacccagtgagggaggcatagagagatcctcagctgctattctggaagtgctgccctctctgtccctccatatcctgtccagcagcccgaaaagccaggcccctcccctctagcttgcagccttcatgctaccggataggctgatgtggaccgatggggaggcgggggggctctcagggtgaaaggaagaaggttctagatgcgaattcagaacccaaacatctggttgggtgtggtggctcatgcctgtaatcccagcaccttgggaggccaaggcaggtggatcacttgaggccaggagttcgagaccaacctggccaatgtggcaaaaccccgtctctactaaaaatacaaaaaattagccgggcgtggtggcaggcgcctgtaatcccagctactcaggaggctgaggcaggagaatcgcttgaacccgggaggcagaggttgcagtgagccgagatcgcgccactgtactccagcctgggcaatagagtaagattccagtatccccctaccccccaaaaaaagaaaacatacaaaatcctgccttggtcccagtcttaggtttcaatttatggggcaagtctgattagttttgttttctgagccagacagaacaaacgacttgaaaaggatttcgctcagtcacatgcagtgcaccaggcagcgcatccagttttgctagaccagaattcaacgtgacagcctccgagggacgggggaggtttcttcctccagtctcctgtgaattcacctagtcgctcagggaagtcattttagcgacactaataattaacctctgaggctgcctcgtactgcagaggggctggaggtgctcacacattcttccaacagctggagccataaacctttcctttccctgccttgctagagatggcaggaggctaagatggcaggaggcgctgggggtgggggatgttcaggagcagcggtgcagataaggggggaggctggtgacagtgctgggggactgtgccctctggcagctatgccagggagaggggtctgcgagcctctctccttgtccttgccaaagggcctccctcccgtgtccccaagtcactaacaggatccctgcatcccttcagctgtctcaggccacatggcagggacagatgccagggccatggctgcggtgagtccccagtccccaaaagcagggagcaagggtccttcctggtaagggactaatgtccccacctgcagcccaccgcctgcacccaagcttcattctcccctcctgcttcaggctgtgctgatggaaaccaaggcactgcctcaggggaagctctgcaccccagcccagcctgcccgcaggagctggttcctacattcctgaaaccttctctttccactgctcctgccagcagccgacttaacatcacaaaagcagacttgcttttttaaaattatgaaatatttcaaacatacaaaaatgcagaaagcactaatcctccctgtgcttgccacacagagccaacaaacgctgacatcttgcatgtctgcctccgctttcttttttagagaaataagtggatggacccagcagaagccactccatgtttggttccgcctctgtctgtcctggccgggtccgatctggcagtgtctcccctgttctcggtcactccctttctcctctcagtctcatggctggggcctgtggccagtcagccagagctgcttagaaagcaggcgtgtgccctcctggggccttcgttctgaagaaggcacgggggaggccgtgtgagtggttttcgtctcagtaaaataggtcagagatgtttggagagaatcgtgaaatgtacagcgcggtcacaaaaggggagttaggaggcagcgcaggacagagccaggcagggcgtgtagtgtgttcccaagaggggccccgggatgggaaagccaagccccaaagtgcaatgggggtgagggagggctacaggcaggccagggcaggacatccatggcgccagactctacctctcatgccccactcaggccactgtcccaccccatccctcccctcggcactcgaaccccagctcctgtgatccccagcaggacacagaccacccccgacactgtcaggccccctcatgagcgcagaggtcccactcaccgtcctcctcctcaggcccttccgatgatggccccttctcaccatccaagtcctgctcctcttcctgcaagacaaggacagggtcagtgcccttggcacagactgggtgatgggaagtggtgggggggcagaaggtaggggagacagaggaggccctcgaaggtccagcctgcccacgccctgtggcagcgcctgccctgtggtcatggtcaaccagcaggtgggggctgtgtacaaacgatgggccaaagtgactcggctcacaaatgctgagctgaggcgtgttcttgactgtgcaccccaagccctcggccttggcctttcccaggtgggtgcctgttgaggcttctgtgtgccatttggagaagtgggcccaggactcccactgcgacgctgcggccagcagacaaagggtgcaagaggaaagctggctggggtgtctgtctgggaccagggccaggcagcatggccatcgcagcctctggctttgcttccttctatgttgttttccatccccaactctctcagtgtccatgttcccaaaactggagccccacctcttcagccagttctctcccacacagagacacaataaacagatgatcagaggaatggcccgggatggccttggtggaaggaagaagtgacttcagcttgcaggaatgtcagaggatgagagcgacgtgccgtgcccatgggctctgtgggattgaaggtcatggggaggggacatgggagccccaggaacttcaacttggaagcccagtgggtagatgtggaaatgaatgaatgagcagccccagctgatcccatggagcccagccagcgtcggccgctcacgggaggctccctaacaaaacactgagctgtgccgggaggcaaagtttttacaagccccacagcgggtcggaagtggcaaacccagaggggccttgagctcctctgagtgactttttgtttgtttggtttctgtttttttctgagtgtgtttctgagacagagttttggctcttgttgcccaggctggcgtgcagtggcgcgatctcggctcactgcaacgtctgcctcctgggtttaagcgattctcctgcctcagcctcccgagtagctgggattacgggcgcccgccacccaagcccagctaatttttttgtgttttcagtagagatggcatgtcaccatgttggccgggctggtctcgaacccctgacctcaggtgatccgcctgcctcggcctcccagagtgttgggattacaggagtgagccactgtgcctggcctgagggacttccttgactacacaaaatgctgcctggggggagctgcgcaggcaacacagcgtcttccctgttgggcactttgtacacacagacttagtgctatctatggcgaagtggtgcctgtgtgtcctgacgtttcccaaattttgcacagcaaagtatctctatggctgaggtcggagtgggcaggcctcttccgggggcaggaagaggagccgctccatttgacacagcaaacccacttctagggatctgctccagactggagaaatgtccatcaggatttttatataatgactctgaccgcgtgcagttgaaaagacagaactggggaccgggtgcggtcgctcacgcctgtaatcccagaattttgggaggcctaggtg[132 bp omitted]tgaggcaggagaatcgcttgaacccgggaggtggaggttgcagtaagccaagattgcgccattgcactccagcctagtgacacagcaagactgcatcttaaaaaaagaaaaaaaaaaaaaaaggaggcgttgataggtgctgacatgaaaagtacatcaagataaatcgagggaaaaatgcaagcagcagccccacgtgagcagcgcagtcatcttgctgtaaatggcaaagtggaaatgcacgcatgtgctcgaaaatgcagagaaaaggtttgttttttggaagggcccacgagaaactgtcagcagtggctacctcttgggaaaggagcttggggggcagcttttcctttccgtcttatagagttcagtataatttggactttccattaatatgcatgaatgactaaatatattttttaaatgctaatggtgtctttggacagtcagatccaaagaccccattttttctttatttattttcttatatattctaaaaaagaaaaaaaaagtaagaggccaggtgtggtggctcatgcctgcaatctcagcactttgggaggctgaggtgggagggctgcttgagcccagaagttcaagaccagcctggcaacatagtgcacacctcgcctctactgaaaatttaaaaattagctgtgcatggtggcacgcacctgtgatcccacctacttagaaggctgaggcagaaggatcacttggaaaaaaaaaagtagaaagaatgtaacatcctaaatatatatatatttggtttcggcccccagttcttgacacagtttttattttgtttgttttttgagacaggatcttgctctgttgcccagactggagtgcagtggtgcaatcacggctcactgcagtcttgacctccagggctcaagcgatcctcctgcctcagcctctggaatagctgggatcacaggtgcatgccaccatgcccagccctgacactgagctcctaagtcccttgaatttcctaagttacaggggtgctagcagcatgttttgttctaacatttggttttgatcccagtccctggcacagagctcctaagtccgttggaatttcccgggtgacaggagtgtcttttgttctaatgaggtaactcctgggtgggctgatcaccagagagatcaagctgcaatgaggagcttggaactttcagccccaccaccccccagcttcctccagagactggagaggagctggagattgagttaagaatcgatgacgcctatgtgatgaggcctccgtcaacatcccgatagggtttggagagcttccaggctgctgaatgcattcccgtgcgcagggggtagcgtaccccaactccatggggacggaagctcctgcattcaggaccctactggaccttactctacttaggtacctccatctggctgttcatctgtagcctttatcacttcctttctaataaaccagttaacataagtgcttccctgagctccgtaagacgctgtagcaaattactcaacttgaggaggggttcatggaacccttgatttgtaggcaagtaggaccaaagtgtggggaacgaggggacctgatacttgtgattggcccctgaagtagggggcagtctgtgggactgggccctaacctgtggggtctgcactgattccaggcagttaatgtcagagttgaacgggaggacacccacttggtgtctgggtggctggagaaggtgttggttgcaggggtggggctggctgcatatttggtatcagaagtgaagggttctgtggagtgttgtgtgcatggacagaaaaacagttggtttttctcatggttgatgtctctctttaatgacaggcaaacagtcactgacctattcagggcacggccccggaactaagcccaatatcaagaatagacaggaggccagttctcctattatgtgcaaaggacacaaagattaaatgaaaaacaacagcaacaatgagcacagtccctgccttacggagctcgtggtccagtaggaaagacaaacaaataattgcactccagggcgaggagtccatgagccagggcagatccgtatccccaaaggacccagtatcagctgacgtgcccaagccctcctgagcacagagaggctggtacacatttagattctgggccaggcacagtggctcacacctgtaatcacagcacattgggaggccgaggcaggtgcgtcgcttgagcccaagaggttgaggctgtagtaagccatgggggtgccactgcattccagcctgggcaagagtaagaccctgtcaccaaaagaaaaaaaaaattgtacttgactttggaagtctgattttttctttttttttttttgagacagtttcactcttgttgcccaggttggagtgcaatggtacgatcttgcctcactgcagcctccacctcccaggttcaagcgactctcctgcctcagcctcccgagtagctgggactatgggcatgtgccaccacacctggctaattttgtatttttagtagagatggggtttctccatgttggtcaggctggtctcgaactcccgacctcaggtgatccgcccgtctcggcctcccaaactgctgggattacaggtgtgggccaccgcgcccggcctggaagtctgatttttaaaaagctgtggtcatgacccattgatgggtcaggaaagcaaatgagaaggccttactagtattgttaaaaaaaaaaaaaaatgggcgaccaaagtcttggtgaagtttgaggctttaataacttcagaagtatagatactacaaatgtaccaaaaaatgacatttgaaaggttatttacatttaaaataccttgatatctctcactcagattcttacagtaccccctctagtgctatacatggctctagttgttcaaacttcgaaaaaccttttatcgactgttggtcagtgacgggaaaagattgcactggtgattccagcttcaccaggttccaaagaactggattttgtgcacacgtgacctcaagggaggtcaattcagcccaggaaaggggtcctttgcctgcctgtccctccagacactagcacatgcggagaattaaaatgaaaaaatctagcacttgactgtcaggaaactaagtggaaaagaaatttaaataagtaaatattcaactgatgttttgtaggtttgtacatttaaacatctgaagttatttattaaaactgcactaagactctggggacac[135 bp omitted]tcccgtctctactaaaaatacaaaaattagttgggtgtggtggtgcacgactgcttcagctacttgggaggctgaggcaggagaatcgttggaccctgggaggcggaagttgcaatgagctgagatcacgccactgcaatccagcctgggcaacagactggatttttttttgagatctgtctcaaaaaaaaaaaaaaaaaagaaaaagaaattaaagacaaacagtgtttt[137 bp omitted]catgtcaaacctcatttctacaaaaaaattacaaaaattagctgggcatggtgggatgtgcctgtagtcccagctgaggctgaggtgggaggatcacttgagcccaggaggtcaaggctgcagtgagccgagatcacaccactacactccagcctaggtgaaagagtgaaagcctgtctcaaacaaaagaaaacaaaacaacaacacaacaaaaaacttctggtgtagctgtgtgactttatatacaggatgtaatttaaaatttctttcttattgtgacacctaattaaaaaaagcttgaaaacactgctcaattggccatttattttgttgtctgtgcagaaatcccctgttcttttggaagttgtcccttgaatcccgtggccccagttggggcggtcaaaccctcccccttccatctacttatctggatgggcgggggcataggcccaggagcccaatttctgcttgggggacaaggaccctctgggaccagagcagtgagctgcctagagtgggcccgggtggagagactcgttggagagccccctcccctaccatgtgcttgtcctgaggccattccaccctgcctttccctgcctgagaaccgctccattccaactcccacagcccctggaccacggtgtccgccatccactgacacctctcctgtccaccactcaccacactcagactttgcaggccaagaacatctcaaatttgcctgcatcaaatctcagctctgctgaagtcaagggttggatagccatggaatgtttttttgagtggttatcaaactgcacctcatagaggcatcccagggcctcacacctgggcttctactggaaataacatcctcacttttatctgggtaacttgttaggcttttaaagaatatactaataataattgaatgaattccaattattattattgttattattgagacagggtcttactgtcacccaggctgttggtagagtgatgcgatctcggctcactgcatccttgcccttccaggctccgtcaatcctcctaccacagcttccctagtacctgggactacagacatgggccacgaggcttggctaatttgtgtatttttggtatagatgaggttttgccatgttgcccaggctgggcttgaactcctgggcccaagggatctgcctgcctcagcctccctgcttctggctgtggtgttttacttttttaaaaaataacgggggccgggggcctgtaatcccagcactttgggaggctgaggtgggtggatcacctgaggtcagcagttcgagaccagcctggacaacatagtgaaaccctgggtctactaaaaaataaaaaaaattagctgggcatggtggcaggcacctgtaatcccagctacttgggaggctgagtcaggagaatcgcttgaacccgggaggtgggggttgcagtgagccaagatcaagccattgcactccagcctgggcaacaagagcgaaactccgtctcaaaaacaaaacaaaacaaaataaaacaataaaaccaccagtgttgactgcattttgccctgattttataaaagtgtggacacaacagaaaagtgaaagtgctgactccagtagtaagaagtgccggtttcagacacagtgcaatggagacaaagacacaaacccttctgcaaggggtggctctttagcttcaggtgtgtgtgtgtgtgtgtgtgtgtgcaacgggatgggaagggataaagcaaaaccttgtgcgaaataccagagctccatcgtctaaggctgtgctcaacagagagctggcactaaggattttaccttcgtgcctccctcatagcacgcccatctttccttccgctttggcacaatcaaatttgcagctatgttttcaggagtgtgcacggtgggggcctggaggaaagggagctcagctgtgtctgcagggagcaaagaaggcctcagagtggatgagaaagccacgctgggtccgagatgggcttgccaggcagatgtagagagaagggcatctgggcagagtgcacagcccatgtaaaggcatggaggcacggaacacctcggctcttccagtggctctacagacttgggtatgattgcagggtgggtgtgacacagtcagaaatagtgtgcagaggctgggtgttgtggcttatgcctgtaatcccagcactttgggaggttaaggcaggtggatcatttgaggccaggagttcaagaccagcttggccaacacggtgagaccccctctctactaaaaaaatacaaaaattagctaggtgtggtggcgggtgcctgtaatcccagctacttgggaggctgagggaggagaatctcttgaacccaggaggcggaggttgcagtaagccgagatcgcaccactgcactccagcctgggtgacagagcgtgactctatctcaaaaagaaaaaaagaaagaaagaaacagtgtgcagaaatgcagggtctgcaaccacagagatcatatacaggacactaaagcgtttggtttcattcctcaggaagtgagaagccacctgaaactttcaaacagggataaacaaggctgggcgcggtggctcacacctgtaatgccagtactttgggaggccatggtgggagggctgcttgatgccaggggtttgagaccaacctgggcaatgaagtgagacccccatctctataaaaaattaacaaattagccgggggtggtggcatgtgcttgtagccccagatacttcggaggctgaggtgggaggatcgcttgagtccaggagtttgaggctgcagtgagctatgatgatgttactgtactccaactgagtgacagtgggagaccctgcctctaaaaaaataaataaaaataaaaaataaacaggtgtcaatacaaattttttaaacgaaaaaaataaacacggacaaacagagtgagagctgcacttgggaggctgaggtgggaggattgcaatggggcaagagaagaggcaggaggaactatgagaagagggtacagagctcaggggagagatgataaaggcccaaactgcgatgctaaaggcacctggccttcagctcagcgttgaatgaatccgtgaaggtgcggccagccaaaggcaatctctccagggtctcatggtctgagtcctccccaccatcaggcagctgtgccatggtgggtgcgaccaggatcatttcctggaggcggcacgaacccaacagagtacgcagctgattcttcctgaggtctcaaaggaaacggaacagagcagctgctcgagcgctgactcaaacctcacccaaggccatcatcaccgcggagttcctgtccatgcccttggtcccaggagtgttcaggctactcggctcatgggctgaactgtgttccacgccccaattcatatgctgaagccttggccccaactacctctcagcctgactctatttggaaacagggcctttaaagaggtgattaagttaaaatgaagccattagggtgggccctaacccaaggactgctgtccttataagaggaaactcggacacacacagagacatgagagttgtgagtgcacagaggaaagaccatgtgaggaggcggagaaggcggccaactgcaagccagcgagacagggcttaggaggacccgaacctgcggacaccctgaacttggccctccagtctgcagaactctgggaaaagaaacgtctgttgctgaaggtgcccggtctgtggtgttttgttatagcagccctggcaaatgaatacatcatgtttctgatgaaagtcaatcaatttcatggaaacagtgaattgagacaggcagctggcgtcaccctggctggtccccagggcaggctgggctgagcccaagctccatcacttcactgatcagagtctcagcattttatgactgaatagagaccacattttaatgtcatgttctgggataattttctaattcagcttttccctccaatggaggaggtggaggcgggagggggaaggcaaacgggacgtgcctcctgacagcctccccagtgctaggagcctaggaccagggtgccccggaggccaagctgaggggcccggccaggctgcagtagctgggagacacagtgaaccaagctcacgccctgcaggctgcacgctgccatttatggctgccctggctgattcaagctaattcaagcgtgatgcaaagtgctgaagtcgggagagggagagaggggaggggagagaagagagggatagataaggcggggggaggggagagagagagaacactaacagagggagagagagtgatagagacagatttctgcctgcgtgtctgctgcccaaggagatggttctgctgtggggcagtgcaaagaaggtctcttgtggccctgtggccaccagagctgccgcatgctgtgactgcaccaatcccactggctaatccagaatgactttagaggacagcggctccaggaggcaggccgttcctaactcccaaggggacacctgtccctcccctgcctgcagcaggcaaggatggagataacaggaaggcgacaaggggcctgcccaggccccccaaccccagaatgggccgggcccagggctgcctccacagtgcctgacaatgctctcactccttccagaaggactccattagccaatcagctgctcatcttttgcaatgggcggggggggagcagcaaagcccagctggcgccagctccgggggcttggtggtgggcagggagggcaggctggggcaggggtcacctctgttcctccatacccggcaaaacaactcagccatctccccctccaaactacagctccaggctggggacacgcaggctccactctctaaatccgtatttgcaactggatgaggcatgtcccaggaacttctgtccagaacctagtaacccaagtctcaaactgtccccctctcacttgtccagtttttcttggcagccacagcatctctgacaccttaacatggcctgggaatgttgattccaacctgacttccttcctttctgtttttttttttttttttttttttttttgagataagagtcttgctctgttgcccaggctgggatgcaatggtgggatctctgctcactgcaacctccgcctcccgggttcaagagattcttctgcctcagcctcccgagtagctggaattacatgtgcatgccagcatccccggctaatttttgtatttttagtagacagggtttcaccatg[132 bp omitted]ccttcactccaacaggcttctggcttcacccctttgttctcctgctacaaccattcaatgccttcaggtggcacctacatctgctctcctccaattcatcctttttggggagacggactcattctgtagcccaggctggagtgcagtggtgcaatcatggctcactgcagcctcaacctccctgggcttaagcaaccctcccccctcagcctcctaagtagctgggatcacaggagtgtgccacaacacccagctagttttcttattttttgtagagattgggtctcactatgttgctcagagtggtctcaaactcctggggtcaagccattctcctgcctcaacttcccaaagtgctgggattacaggcagaagccaccacacccagccctcatccagctttaagaacatcttcaaatgccaacttcataatgtgtttcctgctcaaaacccatgccacctgcctacattgcctgaccttgttcaatttcaataatctctgtttctccaagttctacttccagattctcctgccatcagattgggtgaggtctctctcctcgatggctaagaaccgagggtgccactgggtaggggtggtgggctgggacttggggtgctctttgcaccatggcctcaggaatgtgatctgtccttccacattcacctctgcacacacccctctccttcctctgtctgggcaggggtcccccagggtcataggacctgatttggaggccctttaattctaccctaggtttgcagagactgctgcaaggaggaggggacagagtaaaaggggcctagactgccacccagagcagctctgtttttgctttatgtcctgggcttccataagacactgaagaggcaagaagggatccagtgttttattattatcattttttatttatttacttttgagactgggtctcactctgtcacccaggttggagtgcagtggcacaatctcggctcactgcaacctccacctcctgggttcaagcgattctcctgcctcagcctcccaagtagctgattagtcccaagtagggattacaggcatgcgccaccacacctggctttttgtatttttagtacagactgggttttgccacg[138 bp omitted]agtgtggcttccgcctaaggaaaaacagtcgctgatggaaacttggatgaactgctggtatcccgtctctgtctgaacgcttctggcacaggaaactcactaccttacagagcagtcttcctctctggggcataacataacagcacgagggcaagaactgcaggcggctgtgcagggcgctgggctacaggcctgggcagggacagaaacaagataccttcctgctgccccaggtgggagacaaagagacaggacctgcctctaggcaggagcccacagcgatttctgttctttctttttgtggcattgtggcgtatttattcaacaggtgcctactgcgtgcgggcctgttgcaggagctgggatgtggcgggcaagggccctgctctccggaacaggcgttccactgcggcagacaagccacactgaaataaaagatgacctcagaccggatgaagtgctatgaagaaagccaaacgtgatgatacactggagagagagagagagtgggcgggcggcaggcgggggactttacatctgctcacgggggcaaggacatagagaggagagaggtgaggaccgactgcgcggaggctcaggcagggaggggtgtgctgggcagggtcctgatgtgggcgcagggctggcaggtctaagcaccagaaaggagtctgtggctgtggggggctgggagcagatgccgagtaggcagggtgctcctggacctggggctgtgggaagtttggaattgcacgcggagggctgtgagcaggggccggggggtgtgctctctgcgctaggaaggtcatgctggttgctggaagagcctggcaggggtggggaggacgggaaacagggagaccagtgaggaggtcactgaacagccaccgaagcaggagccagaaagatgagaggagggagggctgctctcggaacacactctggagagaggtgaccagaattgcagacagcaggtcttcagggcgtgagggaggcggggacaacaaggacatgtctgggcttttggtctgagcagctgagcgtcgggggggtggatccgggatgagatgaggaatgccgggtggaggggcagcagaaatgaggcacttgtcagcgtgttgggctgaggtgcacgtagacaacccacaggccagggagctcaggggaggcgagagctgggcgtatagatgtgggcaccatcagctattgatcagggggatgggggcggcaggtgtgttctggaaggcagcaaggcaggcctggtccaggagtcctgcagttgatattatgggcatgagctcttccagcagggcaaagagcagagggagtgtgctgggtaagccgcagacaaggagggagtatgttgtgggtggggggtgtctggggagagacaggatcactgttcctgcgaggagccgaccccatccgggccccaacccctgcccagggccgactgctgcgttccaatgtccagaccaaaagcatcgtcctgcattccaacctcacatcccgatcaagggcacattcacaagccctaaacaaactcttgctcagatgactggagcatgccagattcaatcctatcagatttaacagtttctggcaagttcctacaaagaggatttagaggacaccaaaagcttcatttaaaaaacaaaaaaggaaaacaacaataacaacaaaacactcttgggcagcaatctgtactctccgcaacccctatcagggaatatcaggtcgaattctaggtgctacattttgagatagagaaaatataggacagagaagaaaactaagagatgaataaaatctgatggaagagggttgaagaaagtgacttaattttatgggggaaaaccaggttgaacaattttgaccatgaccagcttgaaatatagtaatagaagataagggctgggcacagcaattcacatctgtaatcacacagcctcaggaggcagaggcaggaggttggattgaggccaggagttcgagaccaggcctaggcaacatagcaagacaccatctctacaaaaagtttaacaattagctggctgtggtggtgtgcacctgtagtcccagctacttaggaggccgaggcatgaggatcccttgagcccaagaggtcaaggctgcagtgagctatgattgtgccaatgcaccccagcctggttctctaaataaataagtaaataaataaataaaagaagaagaagaagaagaagacaagtggtcagtttttaaaatctcttgagggccgggcgcagtggcttatgcctgtaatcccagtactttgggaggccaaggcgaatgcattgcttgagggcaggagtttgaggccagcctggcctgtaacacgcgaaacttcatctctactaaaaatacaaaaattagctgggtgtggtggtaggtgcctgtaatcccaactatttgggagcctgaggcaagagaatcgctggaacctgggaggggtaggttgcagtgagccaagatcgcgccactgcactccagccagggtgacagagcgagactacctcttaaaataaatatatatatatacgtatatatatatatatatcttgaggaggcctcaccataggaagaacttcctgaaaggctaacggctgacttgactatggagtagggtttcctgctgatctccagcagaacaccactgggctgggggcattttcttctcttgaagtgggaggatggcttgagcccaggaggtggaggttgcagtgagctgagattgcaccactgcactgcagcttgggtgacagaaccagaccttgtctcaaaacagcaagatttatctcagactctgagtcctcagcaaataagaatcaggccaggagaaaaacgatgaataccaaggacatcacacaagaaggcccttgctgagaatctgccagggttgtctcacccagaggtcaggttggtcagcgggttataaatgtgcgcaaggagttctcacttgaaaacattaaatacacacatacacaggccacaaaactggagctgaagggttgggcacagtggctcgcacctgtaatcccagcattttgggaggcagcggctggcagactgcttgagctcagcagtttgagaccaacctgcaacatggcgaaactccatctctacaaaaaatacaaaacttatccaggcatagtggtgcgtgcctgtggtcccagctactcgggcggctgaggtaggaggatggcttgagcctagcaggcagaggttgcagtgaactgagattgtgccactgcactccagcctgggcgacaaagtgagactctgttttgttttttgttttttaaagccagttaactttagcagtagggggttgtatatcaagtttagtgacactaatgttaacaagttctgataacccaacaccattggaccagctgaggtcctagctcaaaaaaaaaagaatacattgaaaaaaacaaaaaactggagctgatgcctggaaagtggacaatcacttctgtaagttctatggcaattcagaggcaacatttgaagataaacaacttccgtgagtcctgcaatgggttttctctgggccatcaaatctcatgcagacattgttttagccaatgtaaccctgtgtccagaaaacagcatcatagccgggcgtggtggtggccacctgtaatcccagctactcaggaggctgaggcaagcagaagaatcacttgaacccgggaggcggaggttgcggtgagctaagattgtgccactgcgctccagcctgggcgacagagggagactgtctccaaaaaaagagaaaaagaagatagcattgcttctaccaccccgcagcagggaatagaatgactagaatgactgctgcagcaccctccagcttccttcagatttttttttttttttttttttttgagacggagtctcactctgtcgcccaggctggagtgcagtggtgcgatctcagctcactgcaagctccacctcccgggttcacgccatcctcctgcctcagcctctcgagtagctgggactacaggtgcccgccac[246 bp omitted]gaaaccccgcctctactaaaaatacaaaaattagccaagcatagtggtgcatgactgtaatcccagctatttgggaggctgaggcaggaatactgcttgaacccaggaggtggaggttgcagtgagctgagattgcgccactgcactcctgggcgacaagagcaaaactccgtctcaaaaaaaaaaaaaaaaaaaagaatgctggaaacagttctgcatgaggtccccttagagaaggggcttctgaacctgacctcctcatcctgttccatacatctgtccttaacagtggcaagcccagtgtggccaaacgcaggttgttccagaaatactcctaaccatcagggatctggcatttctctggaagacggtttaccagaggcccaagctggtctccctcctcccacagtgtggtttgagccgagtgggaaagagcggggctacaaaaaggaaactgtctgcatgctcaccatttcatttctagctctccaaagctaggtggctttttttctcaagacatattctttaaaaacatactccttcttgctaagcagaaaattctagctgacattagtctgtaaccaaggctctttctctctgaaagaacaaagtttatctattaggaaagcccctggacttctttcatatatggaaaaaaattaagttaggcactcaaacaactttacaaaaaaatacccactggaactactgaacagggaactctacttacagccctccaaggcatcttctattcagttgctctatatcgttatagttattgtgaatacaatattttatgttctacctttttacttatttcatactaatttgctaatgaatccaatgtgctaattaatgaacatttggattatttctagttttttccccagtaagtcactgggcctgttctggactaaatatttgtgtcccctgcaaatctatctgttgaagtcttaacccccagtgtgatggtatctggaggtgggggtctttgggaggtgagatttagacgaggtcacgatggtggagtccctacaatgctatgagggccctgataagaagaggaagagacatccctctctctctggcatgtgaaagtacagcaagaaggtggctgtctgcaggccaaaaagagagccctcaccaaaaccagaatctgccaacacctccatcttggacttcccagcctccaaaagtgtaggaaataatgcctgttgtttaagcaacccagtctgtggtattttgatatatcagcctaagctgcttaaagacaaggacctaaagtgatataaacaactggcaaatatctacttggccctccactacttggcttctgagattttgctaagagaacagaaagtaggaccacactgccatcacaaaggcccacactgccatcacagaggaccacactgccatcacgaaggcccactctgctatcacaaaggaccacactgccatcacagaggaccacactgccatcacaaaggcccacgctgccatcacaaaggcccacgctgccatcacaaaggaccacactgccgtcacagaggcccacgctgccgtcacagaggcccacgctgccatcacagaggcccacgctgccatcacaaaggcccactctgccgtcacagaggcccactctgccatcacagaggcccacgctgccgtcacagaggcccacgctgccgtcacagaggcccacgctgccatcacaaaggaccacgctgccatcacagaggcccactctgccatcacagaggcccacgctgccgtcacagaggcccacgctgccgtcacagaggcccacactgccatcacaaaggaccacactgccatcaaaaaggaccacactgccatcaaaaaggaccacactgccatcaaaaaggaccacactgccatcacaaaggcaggagagatgatggggaagttcacctgctcctgggtcattctgggaaggctggggtctctgtagcttccagagcccacacctatggtgaacaggttggtgagggcagaggacacaggtggacctgacagcagggtgacttcaggggaaccagggccaagtcacatggttaagacagacagatgaaggctgtgctacccactcagaccaccacctccagagtgtctgaaaaaccaacccctttcccaagaaatttcccaaagaagaatgttggcttctttgttccaacattctcttttgaaaaattccaaacctacagaaaagttgaaataataatacaatgaataccatacacccttcacctagattcaccaatggttaacattttgccatctttgcattctctctctatacacacacacactgtgtgtgtgtgtgcatgtaactatttgaatcatgacatgtcatcccaaaatgtttcagcctgcatcttcctaaggataaggacattgtttacacagccatctgccggtatcgtacacaaaaaattcagcgttgattcaataagcttacctaacacagccattcatttaaaaaatgtctcaattatctccagtatgtcctttatagctcccttctctgatggagaatccaatcaaggatcaagattgtatttatttgtcatattgctttaatctcctaaatcccaattaaatctagaagagtctctgtgtgcttcatgacaccggcccactgccttgcaggaagtccctactctttttttttttttttttttttttttttttttgagatggagtctcgttctgttgcccaggctgaagtgcagtggcacgatcttggctcaactgcaacctcagcctcctgggttcaagtgattctcctgcctcagtttcctgagtagatgggatgacgtgcacgccaccatgcctggctaatttctgtatttttagtagagacggggtttc[132 bp omitted]ccaagtaccgagatacttgagtcctggcacagacaagaaatttaactctagtgctattcaaatgacccttgacgctttgccaattaccaatgtttgggaatccgaccatccagccttgctccaatccacaagtccattaggtaagaggcctggcaatcctaaaaccccaacctacacaggagcaccaagaaagccctgagtcctggcctgaaaagaggccggctcctgttcttgacttcgttggctcatgattctttgcgtgaacaggccttgcctataatgcttcctcacagcccaccctgtgctaatccttaggagagaaaagaggttctagcagtatcattccgcttctcctcagcctccctgccctggcctgtgctgccctggggaagcaagagctgcactgatctcatccccatttctttggtccatttccagggtctcggcctatagtagcccctccccactactttgtccttggccaaagagggcaccgtgcactaggggacgctcctgagcgatccccaatagcagctgaaggctgcttcccggggcgagagatccttctcaataatcagctttgtagtcagaggcagcagctgccccagcccgcccaggcctccctgggaagggagaggactggattagaaaggaggcagttaatggaaaatgaagagggaggggagaggtgagttacacgctgctccccagggcagtgacttccgagctaacagcaggtggagttgccctcctccctcgctgttggtggggttcgcttagggacggagggagaaggaggctggcagagggcatagccccacttcccaaccctgatttgagttatcttccccagggggcctttctccctatctgtcctccaagccccagcagtgtgatcatcagaagaaagcactggaagctcttggaaacgctggagtccacttcaggacaatttgttttcctttcttttttttcttgtcactgactcgaagctcatcaagacaatttctaagcagcttcttaggttaatgccaccactgggagtgggtgggatgacacaatatctgtgtccccacagcacctggcttaatgtttgcaggcaggagttttgggggagctttggccagctcaggaaggcctggggacttgaacccaaaggggaagggcactgacttcaattgaattctcctgtggggtgggttctctctggagggtgccttagcgggaggacagacacaagcctcaagtcatcctcactggcacctatgtcatgggggctgcctggcacgcgaacccccatactgccttgtccttcagagcacccattcagcttcagaggacgtgcattcacccagacagtggcaaattatgcgagtggccctatttaaacaccactgaacctattcctgtaggtaccatgtgctgagagccgaaagccttgtagaaagttctttaagcgctgtgccccacaggattgagctaagacagggcgccgctaaaggacattttgcacttcagtccagagcctggtgtgggtgataaagggccagccctgtaaggccaggactgactgagtgtgcatgacggctccagaactgtctaaaggcctctcctgctcccgcgagacctcgatggaggcaggaatcccaaatatgggagcaaacacaacagatcagcacatgtccaaaccgcgccccctccaccatcaccgcgtgaggtctggaagcccaccccaagcaagaacggcagggcctgcccctgctccaccccattaaatgtggctggttagaatcctctctaatgacacaattagtcacccacttgtcaagcaaagcgcctgctcagagggggtctggcgcacttactcagcaaagagaaatgcctctgagcacagcctggctgcctcctcctcccccgaagggcttctctccagggtaaaccattgtgtccagcacaggacagagtgggcacgcagacacgcaggcacgctgacaatgcgcatcccggctctcctcccttccaagaaaaggagctcaggggtaagaacaagggattacaatccgactcggagaccctggcggtggcctggaccggccaagcgtggtgaactccagggaacatgggcacacagtgtaggggctgggatgagtggatgagggaaatccgactcctctcagatatccacaggcaggacaaggtggccaaggccgagctgatggacagcatggcgggaggcctggggcagaggcagggagggccgctttggggtgctcactggtgctccaggagggctttatcctgcatcttcactccatccaggcccagcttacctacaacccgggggagtgggggtaggagggtgttagatgtgtagcttgaaaacgacaataaaaaggactgctgggatcgggtgccttttctttcagtcccagcccacgggcttcacaaaacgccacagcactgactctgaaatctggacttcaaattggctgaaaaagaaaagccagctttcctccctcgccccccgaaagtcctactttttaaacatcaagataactctcatggcaggcctggaaataagccacaggcacgtggatttgggaaccggtgggcgggaggggtcagaagtgggtgaggagcaaaattccaagccctggtcccgaggcctgggagccagcagctgcggagcacgccctgggctgggagaggccgaggggaggggagagcaaaacacctccaaacaaactccttcgggctcgcccctcgccacactttctgggggagggcggcgagtttgcggggctgcggcttagcatggcgggacctgcatttcctgcgggccgcgggttctgcgcttcctgggggcagcctgggctggaggccgcggccccgctccctggctcggcggggaacggcagcggcagccggagccccgggggtggggagggggccgcgagggccccggtgcgtacctgcctcgcctccaccgcctgctcctccgcctccgctggcgccgccgcgggatcccctggcccttcgggctcccccggtcccgcaggctccccgagctcccccagccccgcgggctctccaggctcctccggccccgcgggcgaggccgccggctcgggggcgcaggggcgggacggcgccggggccccggtggcctcggccgggggcgcgggttccgggggcgcgcgggcaggctccgggctcgcggccgccccacgccgcaccagtagccaggcgagcagaagggccagcgcggtggccagcgcaggcagcgcggccagtagctcggccggcgcctccatcgcgccgcggccgccgagtgcgggccagctgggaccccgagggagcccgccgcgccccgtcgccgcgcccggtcgccgcgccccgcctcggggcggagcccccatcgccgcgccccgcccccgccccctccggccccgggagggtgacgcacaggctgcgggcgggggtgttgagggggcagagccctgaccacctgggaggcacaggagggccaacccctgcccggcctgggcagccttgacgctttggggcacaatttagctcaggttcaatttgaaatactgtatgaggtgcccttaggttgtcatctttggccttagtacggcggttcgtcttagagcattttggaaatgtgggaatgcagagagacaagcaaacccgggaagcttcatggaaacggcagcctggattggcttgtaaagcaatcataatgccggattacgttcagccactgccgtttttataggcatgtcaggagttgcttttaatcctcagggttgccttaatgcactttcacagaggacatctccagatcccggccagtgaatgctcccttcggagctgaggccagcagccttcaacacaggcctccctgttaacagtaacatggctcccccgcccctagacctgaaattcagctgcaggtccttggtcaacgctattcctcttaccagactttcttctttgcacaattccagaatgcatgcagggtgggagggtacaatgaaggaaatgaaggctattgtttttgtttctccagatcctcccaggcctctgttgctgaacagtggattttgagataaacacgttgtaaccaaaaacatactttcctaccactccccacccactctttagttattttaaataaacacaggacgggcatgtcaggtatcacgccaaacataaggcctaatgttaaaaaaaacacggttccagtttttgctgaggatgcctttaatacttttttgggaatattacagtgcctgagctgatctgtgatataaaccagatattagatggagtgcttctttttaaatgaagatacacaaacgagacccctcagcaacagggagagctgaattctgctgcactgcacgatattaagcgggccatgcacttccttttagtggtggttgatgaaaagagcctataaactataaaatgtgaaataggctttatctacgggcgactagcttttaaccactgtggaagtttcagccagtgtatgggcctattttttttcttttgagatggagtcttattctgttgcccaggctggagtgcagtggcgcaatcgcggctcactgcaacctccacctcccgggttcaagcgaaactcccacctcagcctcctgagtagctgggattacaggcgcccaccaccatgcccggctaatttttttctgtttttagtagacagggtttcaccgtgttggccagactggtcttgaactcctgacctcaggcaatctgcctgcctcagcctcccaaagtgttgggattacaggcgtgagcctccgcgcccagccaattttttttttttttttttaaagagacagggtctttctttctttttttttttttaaagagacagggtctcactatgttgcccaggctggagtgcagtggctattcacaggcatgatcatagctttctgcagcctcgacatcctgggctcaagtgatcctcctgccttagcctcttgggcagctgggattacaggtgtgcatcaatgctcctggcccagggccttaattttgtgctccatcccattgttttaaagtgtaaatacatttttttaaagtcctgttctgctgacaaagtacattgttgactttcaaatgagtaagaaagaaaataaggacaaaacaatgccaaaaacacaactccaaatcatgttgctttatttaaaatgatgaacaagtttcacccaagtgaaagtttaaaataccaacccaatagcagatccacaggctttcatggcagaccccatggctagacggacgcagaactaggagactgctcagtgttctgacaactccaggaggcacgagtgtgcagaagacagtcccagttcttctgtagcatccagtcactttggagacagctggccagggctagctctcctcccaggaggttcactggggcttagatgacatttctttttttttaaagacagagtctcggtctgtcacccaggctggagtggcttgatctcagctcactgcaacctctgcctcctgggttcaagtgattctcctgcctg[133 bp omitted]atggcctcccaaagtgctgggattacaggggtgagctacggcgcctggccgaaatttctgaacaatgagacaaagttgagagccaccgcctgggggtgcaagctcacctagttttgctgcataggatgtcacatcttgacacaagctagtgggaggggagtgtggaagaagccgccagactccacttcaaatctaccagcaataccagtacacacatcaaaaacaacttactcgtggaaatactacagacaatctaaagaacctacagctggggcatccttatacgccttcctcctacacagcattttttacatttactgcaaaaattttgttccatcctatactcgtctaaagtcctaaatccaaggctcagtctctagtaagcttataaagcatttgcaccagcaaccttcccacagatccttagttttgctactttatgaagaagctgttactaccttaagtatacattggtgttaattatgctctttcatgtagatccgttacacctgcatttaagaaggtctgcactttcttctacctgccctcaccagcggccctgtgaacagccgcaacagccgcacattcactgtccattaagcttgtggagcttgtcagggacctgggcttgtcaccgttatctccagcacctcaagagcagtgcctggccctcaaacacctattgaacgcttgaattattaagacacggacagctgcaagaatacagcaaaatgtgaatgtccctcttttcagtggctctcccctcaaggatgtcaccctaaacatcccagtaccactaatggcagaggcatgtgtgtgaagcatggattcttccagctgatggtgaagcctcatccccaaagacccagggtcctcctgatgttctaggtccccaactcttctctctcccactctggtccttccatcagaagttaataatccaagatcccttcttccaggacccagctctttggttttaagatctgctgtcatcttggagaatcatccctgaaaataatctaacattatctccttcactttactgttgttggcaccattcaatggagtagctcacgccagatgggaagaggagttaacttctgaacaagtggtctctgggtacccactcttcctagtctaccttggccacccgccaccactccactccttttccacacacggtttccccaccttgcccctgttgtgcttacataacggacagcctggctagcccacagagacagtaacgggggttggggaatagggctgctgaatccctggcctggcaggaataaacaaagcatgtcccaggagcacagaatctgtactatccagacactgtactatccagagctgacttgggcctatcagatatgttattcccctcatttctggaatactgttatcaaacaggaatcaactttagcatctggagaaagaaaactgggtggctaatctttattttctagattattatttttttgagagatgggatctcactatgttgcccagactggtcttgaactcctggactcaagcaatccccctgcctcagcttcccaaagtgctgggattacaggtgtgagccactgcacctggccttggtggctaatttttaaaattcaaaatttctgctcccctatccagaccactggcaacgtgtcctaccacgccccctggtggcaaagagcctttttgggctgttttttattttaaactgaagtttagaggagttgttgatagaaaactgaaaggaaggtaaggaaaaagggcaagcgtggcagcacaggagcaatgctgggaaaaagaaaaaagctttttatagatggcaagaaaagtctttttaaaaagcaggagtagcaacaccactcagatattactaccaagagattatacattcagagtttgactttactcacacccaaacacatcctgtgcccaccacagaaccaagggggctgtgggcgtgggggtaaggagggagagcagcccccatggcaggcaggcagcacagttctacctacccagccacatactggggttggcatttgaggatgcagaaaattgaactaagacaaaaatagagaaccagcctcctagagtaaagccacatgacccaatgtcaggaaatgacagtctgttaataacagtgagcagagacctgtattttcctggttacacctgtttctagtggatattttgagaggcaacagcacacaattctaacacatccacacacagcctccctgcctgtgaacactgcagtgagagctccttcccacctgcctgccaatgcctccaacgctccagcccaggcagtgcttccaagtgcgccccatggccttgacaacccctcttattgaagtttagttgaatttagggacaaattaaggcaagcaggtgaatcaagagggcaagagatggcatctgctggtcaatccccaaaaagtcatccagttagttatttagaagtatcaacagactgcaaagactacaggtgccatctctgaatttactccccgtgtgtaacacaagtcacccacttaacgtctgtaggtcaaacaaatggggaacgctaatctcagagtacctcgcaaagtgagcacttcttatggatcccatggtgcggaagaatggagcctattcatactttaagttctgtggtaagagcacattgcacaccgttcccactctatgcaaacaaaaaaccccaatgtatcacccccccacaaaaaaatacactgtacaaaaacacccctgaaatttcagtctctatgatgatggagaaaaagataaggaatcctaagacagactgagcagtgggtgatggtgatggtgctgggtcactgccactgaatgcatttgtgggctgatgatgacatacaggaagaagggcagactccaagtccttccgacacataattggctcacaaagtccactcaccactctcagtctctgtggtacacagctggctctgtggaaactccttaccgacatccgtgaggtaacagacacaagacgttacaaggatcacaccctgccagccttgtggttgactggctcggttttcaatgagacagcacagaaccttcttacccaacatcccattagcttcagtgtttcactgagctggccgagctgttaaatttcttgataatctatccttaggaagcagtaaaaacagcatttgaccgaagataggagcttggaccagggaaggaatatccaaattcaaagaagacagaggagaaggtaggagcagaagatgcgagaactgagttgggtggctgccaaaagcttacgctgaaagcacctcagggagagtctctttatctgctcaggggtgagcccggcctccacaagtgtccctaatcctgccaaggaaagcacaactgcctgtaatcagcacgtagacagcatgctgggtacaaagctggaaggcaatgttaaaagcaggacccccgggaccccacgtggaagtcatggcagggctttctccagagttttcttacaaattacaaagtcacagatcaagtgcagatataaatctataaatatgtaataatagaaacaatttaaaaaggcaggaagagtctaagtatggctgtgaaaggacatcgagggttgagaaatgcacattccagtttgataaattcacttgagtaagtcacttgaatttccccatggaatttcagctaaaccacagagaatggaggccacgcgataggagggctgcgggtcctgcacttcccccatgcatttaagaaagactgagctgctgggagagaaaacgttaacaggaatgtcaccttcagcagtcaagggcttcagacattcaaaaccctatgaacgtcagtattaaaacatgtatatatatattttaaagacagggtatcactatattctccaagctggtcttgaactgctgagctcaagtgatcctcctgccttggcctcccaaagtgctgggattacaggcttgagctacgatgcctagcttcaacttcagtattttactatcttccaacaacctctcttaacacttcaaccagcacatcaaagacctgtggcatttaaagaccctagacaaatgcagagtgaacaaattccattatgagcctgttacatgcccaggtgcttgcaaacacgtttaaattttaacttatttaggtccaatcttgtacttggagacgtgattaagtttttataaaagctgggtgaggtggctcatgcttgttgtaataatcctgctgctttgggaggctgaggtggggggatcacttgaggtgaggagttcaagaccagcctgggcaacacagagagactttgtcactactaaaaataataaaaaaaattagctggccgggcatggtggctcacatctgtaataccagcactttgggaggccaaggtgggcggatcacaaggtcagaagtttgagacaagcctggccaatatggtgaaaccctgtctctactaaaaataaaaaaaaattagctgggcgtggtggcgcatgcctgtaatcccagctactcgggaggctgaggcaggaaaattgcttgaacctgggaggtagaggttacaataagccgagatcgcatcactgcactccagcctggacaacagagcgagactctgtctcaaaaaaaaataataaaaaaaaaataagctgggcatggtggggtgaatctgtagtcccagctacttgggaggctgaggcaggaggattgcttgagtttggaaggttgaggctgctgtgagccatgatcacgccactgcactccagcatgggcaagagcgagaccctgtctcaaaaaaaaaaaaaaaaaaaaagatttgacaaatcagagttttctgctgctgtctgatttggctgagcactcaagcagcaacggcaaactgggagaaaaagcaagaggccacgcctcaggttctgcagaagatgccgggtgacttttccaatggctctccctacgctgctgggacgacgactctgtggtcaaggatgcacagcaggagtcactgctttcccccaagaccaccatgaggagaagagcaataagggaatgttctggtattctcaaaggaaaacatttccaagatagaaaatggattcaatttttattaaataatgtaaaggattttcttggcactattcacattctcttgcctgagtaaaacaagccgcgtttatctgcattggtagcagagggaaagctactggagcaaacgctaagtgaatgggttcccgtgccgagggtgtcctcattcttgggctctgtcaggcctccccttgtctgcaggactggacaggccaccctccccaggccctgcccttgccgcgagcgtgtccttccatacagacaacagccttgctgggtcacctggaggagctgcgctctttgctgacacagtcgtcctgggaggtggtgtccccgtttcccaccatgctgcacgtcctcctcttcttcctgcggtgcactgtcccatcgccctcggatccagactcgcactggacacaggaggacagaaaacaaggagtcaacctggatgcaacccacttcttcattaaacaaacctctgacctcgggagacagcacagatattggtcactttctcccaaatgcaaagcagtcattatgacagctccacaatgtagccttcatagccacctccttggatgttcctggctccctaagaatttcaaacttccctcagaggccaagtatccctccactgttctcttaaccgtgtggttatctgtctgaataggatacccattgtaaaaatcttttagtcagaattctgaaagtacattataagatttcactctaccaacagagcttgatatatgaaagaagtaggtatagcactgaacattcccagagcctgttccccgcctgacgagaaaagactcaatcagtagactgtgtgaaaagacagaatttttttttttttgagacaaagtcttactctgtcgcccaggctggagtgcagtggtatgatcttggctcaccgtagccttcgcctcctgggttcaagtgattctcccacctcagcctcctgagtagctgggattacaggtgtgcaccaccacacccaactaatttttgtgtttttagtagacatgggatttcatcatgttggccaggctggtcttgaactcctgacctcaagtaatctacccactttagcctcccaaagtgttgggttaacaggcgtgagccactgcgccaggctgagatagaaatttcatctgttaaaggtgcagggccctctcacccagtattactgtcagcttcaagtttaaggttactggatttgctgaatttccaggcttacaattcaccatccatgggggaaattcttcatatgagctttgaggtcagaaggatgagtttgaaatctgacactgctgcttcatcttgagccatttacttcactaaatccccaaatacccctgatacctcgaggctattttaacaattcttagccgggcgctgtggctcatgcctgtaatcccagcactttgggaggctgaggcgggtggatcacctgaagtcaggagttcgagaccagcctggtcaacacagtgaagccctactgaagtatacagagtttatagtctctactaaaaatacaaaaaattagctgggtgtggtggcatgcgcctgtaatcccagctaccagggaggctgaggcaggagaatcgcttgaacttgggaggcagaggttacagtgagccgagatcgcgccattgcactccagcctgggcaacaagagcgaaactcagtctccaaacaaacaaaaattcatgcacatgtgcaaagctgtaaaatgggcaagatacaccactcagcaggaatggtgacaactgtgtaacccttagaacaacgtggaaaaactttcatatccttctcctggataggaggaggaagagtcacacctggttatgactgagttacatgagccttggaggctccaggagtcagccagagagcaaggcctcacctctgagtcggagtctgacgaactggagctggaggagctggaagagtcgctggagctgtcggaagctatccctgtggactcctgaaggtcaaccgagtctgcgaggactgccaactcggggtgctcttgcttcaaaatcctgagaggcaagaagtgttgttctcagtgcactgacagccatacccactcacaaagactcactcagagtcgaggcctgtgtctctcagaaacacctgggaatgccaggtgtgtccgttcagaatggatactgtacaatggtgaggacaaaaccccaggctgggaacaagagaaacccaatacggtgcccatgtttttctgcaaggaaaattatactaactacacacaatttactaccacctgcataaatgagccagccgtgccaccaatacacgaggcacaattttccttaagttagtcttagttttattcccttaggacaaaaagtttctcttcctagttttacttcctgaacccttcccagttgatttttaaaaaaatctttcctttccacagcacagcacataatgatcagagttgcattggttagattctatttctaagagtagaaacaattagatttgtaagaaatacgaggtgtcaaataacagagatggtcccccctcactgggagcgtaaaactgaactgaagagcagcagccctccccttcagaaaccttatctggcatccactgtatccagtgacaaaagacctgttgtatcataaggcctgcggtgtgaccaaatcacagcacgcagtggcctacggggcggggtaagtgggcctcagatgcccaagagtccagggagaacagaagccaccacccttactggccctctcagcagggaggctgagcatggaacaagccagaatccctctcttaccccgagagctggtccctccaggtcagggttgggacacagtggcacggggtggctgtgggtggcttgcactgccgctgcccgtgctgtatctgttctgtggataaacagaggagctaagtctccagggcagtcacctcactcacaagaactgaaggtattaagttcaaatgggaataatgcttctaggtaagaaaaagaaacaacccaaataaaacccaaataaaatgattttagctagcgctagctttgaaaaacaaaacacaaaacaaaacgagaaacaatcccaattatgacgtcttgactgagtggcttggattcaacatgcagagtctcaccctgccacctcgaggctggcgaacaccctgaggacttgccctgaccttggcccctctctcctctacccagagggtcggcagccccagctttgcccaggcctgtgtacgatcagcacacatcatcgcagcagtggactagccattttatctctggggtcgaaattgaaaccaagcagaaataagaaaaaaatgactctcacctataccatttccttgataactttggtctccctcttaccgtcttgtgccataccacagggaagttggtgctgctggcaaaattttgggtgatggcgatagtagtgtcgagattgaggacaacatgccaccagcctcctgaaatccaacaaataaacagttaaacaaggtttgatcctatacctaattactgtataacacacacaccagaaattgggaactcctacccataagggagagcctacagagacatgatacagggtagttccttctgatccagggattgcaaacaacttgtttgtgtaaatcaagttttatcggagcacagccatgcccacctggtgacggattgtctagggctgctttccagctacaaggccagagttgagcagttgtgacagtctggcttacctaaaatattgactccccggccctttatagaaaaagtttgtttactcctgttaatccaaagctatgaccaaaagtgcaaaagcataaagttcttcagcctctacgaagaggacacctactttaaatacacttaccttactttccttcacttatcaaagcgcagttgtctggtgtgggatttcctgactcaacacggacagtgctatactgcatcaaaaacccaatttaggctgcgcttggtggttcacacctgcaatcccagcactttgggaggctgaggcaggaggcttgtttgaaccaaggaggccagcctgggtaacagtgagacctccaattcaatttacagaattaaaccctggccgggggtggtggctcacgcctgtaatcctagcactttgggaggctgagacgggtgggttgcctgagctcaagagttcaagaccagcctgggcaacatgatgaaaccccgtctctactaaaatacaaaaaattagctgggtgtggcggcatgtgcctgtattcccagctacttgggaggctgagacaagagaatcgcttgaacctgggaggaggaggttgtagtgggctgagattgtgccattgtgctccagcctgggtgacagagcgagacttggtctcaaaaaaaaaaaaaaaaaaaaaaaagaattaaaccccaatttacagaaacacaaacaagccgctacacatacacaaacaaagaaaagttgtatctttacatacaatttttttttttttttgaaatggagttttgctctgtcacccaggctggagtgcagtgacacaatctcagctcactgcagcctcctcttccggattcaagtgattctcctgcctcagcctcctgagtagctgggattacaggcgcccgccaccacgcctgattaatttttgtattattagtagagacagggtttcaccatgttggccaggctgatcttgaactcccgacctcaagtgatccacccacttcggcctcccaaagtgctgatattacaggtgtgagccaccgcaccgggcctgcatacagtttatcaggttttatagccatataaaatgtgaacaagagctcccaaagtatgtgacactatagctacatgttactgtcagaggtgagtaccagttcatttaccaggcagcatccaaaggattttttggactcactctctaacagttctgctccaaaatgacaaaatattgaaatcaaagaatgtactttcttttttttttttttgagatggagtcttactctgtcaccctggctggagtgcagtggcacgatctagactcactgcaaccttcgccacctgggttcacgtgattctcctgcctc[175 bp omitted]gcccggcaaagaatgtactttcttccagttcatctatacctggtacaaagacagtctctcctggtttttgtaagatttccaggggtttgaattcaggtggccaggttggaagctgtgtccggggataaataacattaaaccaggtaatagcttcgtcttgctggttccctccttcgtctcgggtcactttgatgagttccctgggagtgctggtaggaaacaggcaccagcgcttgtggccctgaactaaggcattccaggcactggttcccagagggtcgatgtgaatcccagttccggagcgtggtggccccatcacaaaccacctacagaatggagatatccaagatgtgaagtgtaatttacttacacacataccacacaaaacaataagtttttagtttttctttgagagtcttgctctatcacccaggctggaatgcagtggcgtgatcttggctgacagtaacctctgcttccccaggttcatgtgattctcctgccttagcctcctgagtagctgggattaccgacgcacaccaccacgcctggctaatttttgtatttttagtagagacagggtttcaccatgttgcctaggctggtctcgaactcctggcctcaagtgatcacctgcctcggcctcccaaagtgctggaataacaggcttgagccaccgcacctggccaggttttaattttatgtgatatgtcatctttatttcagagattatataaattctggtacacagaaacactgggtgcat[133 bp omitted]tacggtgaaaccccatctctactgaaaatacaaaaattagccgggtgtggtggtgggcacctgtaatcccagctactcaggaggctgagacaggaggattgcttgaacccgggaggcggaggctgcagtgagctgagattgcgccactgcactccagcttggacgacagagggagactccatctcaatgaagaaaaaaaaaagaaaaaaaaagaaaaatcactaatgtggtttattgctggactttattaaaacctcccttagagatcagtgcttcaaccatagctgcacattcaagtcacctgaagagctttcagaaattctgatgcgcaggcatcacccgaattaaatcagtctccccagtagggcccaggcaggcctcaggagccccctaaatgagttcaatgtacagccgagggagtactcactgtttccaaaaaagattagcaactgaactcagcgagcaaatgctgttgtagataagattttaaccacaggccgggcgcggtggctcacacctgcaatcgcagcactttgggaggccg[133 bp omitted]ggcaggagaagcgcttgaactcgggagatggaggttgct[131 bp omitted]ctgcgcttctccccagcatactggaaaaggtcatcagtgaaaaactttggcaccttgtagtcttccaaaagtttccttcttttagggtgttcaccatagctgctgtcaaagatgtaaaggggactatcatctcgagtgctctccatgtactcgatgtagtatttcatcttcatcttcactgagtagccatcgttatcctcaccacacttgaacttctggttccgatatttcctttttaggcgctccagagtccatttctcctgcgcagaccagccctcttgcgcattcaacaaaaccacgggcttgtaaggtctttcataccgctccacaaattcttccacagacagctgtaaagcatctgccctttccacgttatcctgagggaattaaaaaagacctgtccagttaaaaaaaaaaaaaaagtccagtggcagataagggtgtccccaaggccaactggtaatgacaaaccgaaggaagttgactctcgtctggctcctccggggtgggggcagggcgcgtgcgtgaggccacgtcgttcctagagccaccccccatgagccttgacagccaggtcccctaggggacccgccgcccaaaggagtcagggacgacgggccttctagttgagagcgccacaggcgtgggactcccgtcgtccgccagagcagacgggcggccacagcacgggaggaagcagacccgccccggaatccgcgcctcggggaccccaaactccgcggggtgcgggtgagcctctacgaggtcccgggcgctcggggcgagggcagcctcgggcccagagaaaggtgcgtagcggctggaggtgccgatgcccggcctggccacccccgcccgacccgctcaccgccacggccgccgggctcagcgagaagctctcgtagtagttgtgccgggtccaatccagcgagtccttgagctccggccgcgcactccgcttggcctcgcggatgcgcttcttgctcttgtggttcattctgcggggtcgccagctggttccgctacgacctcggcgcagcccgcttcctgacactaacgcacccctccccggcctgggcggcggcgacggcagtacccaaacgcccttcgctcagtcccggcgcctttaaagtcgccttccagaaaattcactccccagccacctcccgagcctcgggttgggcaagcggccgccgtcttccccgccccgacgcctctcgcggttttccattggctttggctcccctggggtactccttcacatacggcgggcctccgccatgttgggaaggtcacgtcggctgcgtcaccgccccgccccgccccgcccctcccctcccgcgctgccgctgtgcccatcacttccggtcgcgccagccgcccgttgccagttctgcgcgtgtgagtctctttcgccttgctccgggctttcttcgctcgcagcgcggcagggttatcaccagatctgggctttccccttcttgccgtcaggtgctacggccacgtggcccgcggcttcccgctcgcgcagtctggcagcccggagccttccgcggtcccccgcccgcccggggcccaacgacgccctactgggcgagcacgatttccgaggacagggggtccgggcccagcgctttcgattctcggaggagccgggtccgggggccgacggggctgtcctggaggtccacgtcccgcaggtgcgtgcagcagcacccgccaggaggcgcctgaggtcaggagcggatgtcggctgacttggctgggttcctgagggaccgggggtgcggacgctcagctgcgcagcttcctgctttaggttgacccccggagcaaaaacgtcggatatgaagcccttcggtgcattaaatgtctctcagtaagaattttggagaccctgccaagaagtgaccctggtcactatgttggtcaggctggtctcgaactgtaagcttaagtgatcctcctgcctcggcctcccaaagtgctaggattacaggcatgagccactgcgccgggccggctttctccacatcgaatctttcctgccaggaaagtgacattcttgactgacctctaatgcttcttttgatcttgtccaagggtttcttgattcatccttatctctcacttttgtgtgagttttgggatcagggtttccagttttatttggtgcccaaagtgtttcttgggttggacctcgcttcttcctctaagctcacagctacaacaaaactctcaataataattctttttcttttcttttttttgagacactgtctcgctctggcgcccaggctggagcgcagtggcgcgatcacagctcactgcaacctccaactcccggattcaagtgatcctcccgcctgcctaagtgctgggattgcaggagtgagccaccatgccctgcctgtcttcggtttttcaaagcactttcactttgcagtatttcatttggttttaacaccagcctgtgaggcatgtcccatgctaaagaaacagctttagagaagttaaatgggaggcggaggcgggaggatcgcttgggaccaggagttccagaccagcctgggcaatatagtgatactacgtctctacaaaaagtagaaaaattaggcatcgtggcttgtgcctgtagccccagctactccggagggtgaggtgggaggattgcttgagcccgagaggtcgaggctgctgtgagctatgatcaggccactgcactcaggcatgagcaacagagcaagacattgtcaagaagaaaaaaaaaaaaaaagactggagtggaggctatttctgattgtttccaaacagcttcacttttttttgctaactgcaacctcaacctctgggctcaagtgatcctcccacctcagcctttcaagtaactgagactacaggcattggccaccacacccaatctggcttcacggatttttttttttttttttggagatggagtctcgctctgtcacccagacgagtgcagtggcacaatctcagctcactgcaacctccgcctcgtgggttcaagtgattctcctgcctcagcctcccaagtagctgggattataggcgcccaccaccatgcctggctaatttttgtatttttagtagagacggggttttgccatgttggccaagctgatcttgaactcctgacctcaggtgatgcacctgcctcggcctaccaaagtgctgggattacaggtgtaagccaccgctcccggctggcttcacgtttaaatacacttgcatttcttcctaaatgtagggggtgatgatattgcctgtgagaatagaagcctctttccttttttttttttttttttgga[134 bp omitted]catgtccggctaatttttttgtatttttagtggagtagagacggggttt[136 bp omitted]caggctggagtgcagtggcgcagtctcggctcactgcaacctccgcctcccgtgttcaagcgattttcccgcctcagctgggattacaggcacgtgccaccatgcccggctaattttttgtatttttagtagagacaggggtttcaccatgttagccaggctggtctcaaactcctgacctcaggtgatccgcccgcctcatcctcccaaagtgctgggatgacaggcctgagtcaccgtgcccggcccctgactagaaatatcttatttgcttgctcgttgcctctctacagtaggatatgtgctcagggagagctatatccccagtctgagaatgatccctgatactgtgacactagaagcacttgttgaataaacagtgctatcaagagtttctatcacattgcattgcagttttatatccccaaaggtcgtggattggtgaacagggctgccatttttgtaatggatgccaatgcctgacagaaattgctgtatgaatgattccaacttccagcagctaaattatttatggcacacaaaaacattcttttcaggtcctgcatctccagtatggaatgtatgtttggccctgtgctgtggtcctggcccagtacctttggtttcacagaagatctctgccaggcaaggccatcttagaggtacaaatgcccctgaagtttccagagttctaggttatgttcagatgtgttaagttgacatgtgtatattgcttgtttttagcttttgttaaatatttttaaatcgggtaatttagctagtttgtaaggtctgtgagctaagaatgttgttttgtttttgtcttaaggtacagagattatcctggaactttttttcatttaaaaagtggtttttcggctgggcatggtggctcacgcctgtaatcccagcattttgggaggctgaggcgggtgcatcatttgaggtcaggagttcgagaccagcctggccaatgtggtgaaaccccatctctactaaaaatacaaaaagtagccgggcctggtggtgcacgcctgtaatcccagctactcgggaggctgaaacagaattgcttgaaccctggaggcggaggttacagtgagcaaagatcgcaccattgccctccagcctgggcaacagagcgagactccatctcaaaaaaaaaaaaaagtggttttttaaagaagatactgggtgtgatggctcacacctgtaatcccagtactttggaaggtcgaggtgggaagatgacttgagcccaggagtttgataccagcctggtcaacatagtgagacgctgtctctaagaaaaaagaaaagtgtgacagagatgataggtggaccacaaagcctaaaatattgactctctagccctttagtttgctgaccgctattctagatgaagcccctgaactgccttccacggccgtggcagtctttaaggccattgttttaggtgtcccagcagtgtcatgcagcctttttatattcaggttgctgtaacaaaataccataaactgggtggcttacaaataacagaaatttatgtctcttgccgggcgctgtggcccatgcctgtaatcccagcactttgggaggccaaggcgggcggattgcctgaggtcaggagttcaagaccagcctggccaacatggtgaaaccccgtctctactataaatagaaaaaattggctggg[177 bp omitted]gaggcagga[136 bp omitted]tgtagtcccagctactcaggaggctgaggtaggagaatcgcctgaacccaggaggtggaggctgcagtcagctgagattgtgccactgcactccagcctgggcaacagagcgagactgcatctcaaaagaataaagaaatttgggtatcagttctggaggcagtgaagtcccaggatgaaagtccttacaggttcagtgtctggtgagggccagaattctggttcagacagtgtcctctgtgttcttaagtgtcttgtaccttaagaagcaaagcaactctccagggcattttataagggcactaatcatgagaactctgcctttatgtaattgcctcccaaggcccacatcagatgggtaattaggatttgaacatatgaattttgggtgaacacattcagaccgtagtgtagccctttctgtttttggaaatgttgagattagtgtaaaaatgtatcccattctctttctaacctcactacctggcctcagactggtgaaggcttggaaaaaccaattttatcacatttgcagaaatagactttcacaccatacttaagaccaaaggctaaatagacaaaccagaagcttaatattaacatcccactcttaacttttactacaccaagtaaatgaaattaggggtaggatttggcacacacctctggtcctagttgtaattgctgggcactcacaataattctatctctgtgtccttccttgaactggaaaatgggaagcttgtgtttatgctaatacttatgaaggcattccctggtattatttcttagtgtctgcaaagcatcttgccgctttgaaggcccaactggaaaatctttactagaaagccatgttgcagacctgttaggttttagctacagaaaagcaatcaactatagaacatgctaacagaagtgaaaattaggctgagtgctgtggctcatgcctgtaatcccagcactttgggagactgaggctggtggatcacttgaggtcaggagttcaagaccagcctggccaacatggtgaaacccagtccctactaaaaaatacaaaatactagccgagtggctgggcacggtggctcatgcctgtaatcctagcactttgggaggccgagacaggtggatcacctgtcgggagttcaagaccagcctgaccaacagggagaaaccctgtctctactaaagaaatacaaaattagctgggcttggtggtgcacgcctgtaatcccagctacttgggaggctgaggcagaattgcttgaacccgggaggcgggggttgcagtgagccaagattgcaccattgtactccagcctgagcaacaagagccaaacgctctcaaaaaaaaaaaattagctgggcttggtggccagttactcaggaggctgaggcaggagaatcactggaacccgggaagcagaggttgcagtgagccgatattgcaccactgcactccagcctggagaacagagcaagactccgtctcaaaaaaataaaacaaaactgaaaatcatggcagaggaatcaagtgccccaaaactacttctgtgtgcatagcaattaactgccagttacgatacatggccctttaatattgaaattgaaggttaagcttttaccttttagcagagtagattcataaggaatgtacttttgtcatgtttatagtaatgttcagttacggtacattttatacaaacccagaaagactgactctatgcttatttaaaaatgcaagaatataatgaaaaagtactaagattcccaattatttgcagttccaagtataattgtgaaatgccatctttcataacttattagattggagctggagtgagccttccaggaattttggctgccaaatgtggtgcagaagtaatactgtcagacagctcagaactgcctcactgtctggaagtctgtcggcaaagctgccaaatgaataacctgccacatctgcaggtggtaggactaacatggggtcatatatcttgggatcttctggctctaccaccacaagatattatccttgcatctgatgtgttctttgaaccagaaggtaagcttttttggctcaatagtacatttggccagtgatgctatatgaaaatctattcataaatcctttctcctcagattttgaagacattttggctacaatatattttttgatgcacaagaatcccaaggtccaattgtggtctacttatcaagttaggaggcaagtatggatgacccttactttttatatgtaacttaagccttactctaccctacccatgcgatacataatttaagaatagaatacatctgaagcaaaacagaaaaggcatgactttaaaagaacaactttttttttttaagtgctgactggtcacttgaagctttactctacaaatgggatatgaaatgtgtccacattcctcttgagtcttttgatgcagacaaagaagatatagcagaatctacccttccaggaagacatacagttgaaatgctggtcatttcctttgcaaaggacagtctctgaattatacctacaacctgttctgggacagtatcaatactgatgagcaacctggcacacaaactatgagcagaccacttcagcttgagaatgcagtgggtctgaagatggtcaagtctgtttgccttagattttgatgtcacctagacaacacttaaactcatatgaaacaaaaattaaaatacgtattacaagtacttggattgttccttagtcattaaataggatataaattaggttgagaagggggtatcacaacctcaagaaaagtgccacttaaagcattgcttttaggtgttcaactggcatttccactttaacttaggaaatgataggcactaaacattccacttccatactatgcagtcagccacaatcacaaaattgaataggtccttcaaataaatgggggaaaaaaagaccgagacatattctgagaaaagctaacaccaagaaaatgttttaattaaactacagaaacaatggttataatacagaatattcataagcaaaaagatacaccatgttataagtacttacaaagttacaaccatttgcttccttaacattttccatgttaagttcatacatgtagatatgatcagatttaccatttttagggggaagagggaaaaaaaggtgtatttatcatcagctagatgtgctcactgtatgctccgttatttatatgcaaggcccgggtgactggaagtgcagttgtcaggcattttaataaactggacagccatttgtttctgcacgacaaggcatctttacacaggagcaatcgggagaaaacaggaaacagccaagcactctgcactgcaacacgccaccttaacagctaaccagcattactcaactgctacacaactgcgcctagtgcacaaaaatacataagagaagagattagaattgtgtttgataaacaatcctttcaaaaaatcaagtcttttcacctgaaaagtctttatacaaatttgggttcagattaccatttagatctgaaggtaaataacatatacaaatttacaccaacttttgtaggtttttaattttaaggaatgaaggcaatgctgagtcaatctcttgacagctttaggctgtgtgtaatggctgcacacgttttccttaaaagtcaggaggccacaaattaggttaccaatctgtttaatttcaaacaaaaaaagtcagcactatataacaaaatgaaattttacctcaaatatccaaatccaataatgaaatctgaagtcgttcacctcactaaattacaagaaatttgaataacagcaacaaaatggcacataaaatgaagtttgccaactgaggcaaagcttaaacaagtaaaaagttagacaaatgttacaaaataaccttttcaatagccagttgcttgttccaaggactcttcttcgatggactatgtggtcctttttccccaagtcctccgtttacactgcttgccgatacatctaggtttgaaaagaaagaagttcagcttaccttccattaaagtgcacatggtttcagtttcaggcacgtacttactaaggctctggtcaaaccagtagggtacagaaatgttccacccagccatgtttttaaaaggcccaattaggaaaatttcacaaaggctaccatcagcatgtacaagtttgaatttacgtattcctggccaaataaccaaggtgaagaaaggtaaggggaagaaaaaaaaagaaaaaaaaaagggctgtatccaaacaaaaacaactcgagatcagagaattggtctatatttcattaagataaattgtttcaaatgaaacatttggtaattgagaatactactttaatatctgagctacttagggccctttcctttttaaaaaataggaccaaacaatttaagagttaaagacacactatcctttccccacccagtgcaatacctgtaactttcttttggggttccaaatgttcactgcttcttattgcaattcttttgccacatccattagaatatgaagtcccagtcagtacaacaatagttgaactgattgtttctctaagaggatagtgcatctttaacatttaaagacaaacctgctccaatacacgcccacagaaactggtccctggaggatcagccaaatcagttaaaatctgcaatactggccaatattcttttatcaaacaggagaccgcagctttaaagggggaaaatgcagacgttggataaaaacagcaagaaatagtcattttcattaataggtctcaaacagtttacgaaacagccattattatctaagcttcatacacatcctttctgcagacccctctcttcagtattactcccaaaggtgagtaacctccgagcagcactcctaatgataggagtcattcttacattaacacgactcaaaaagacctaccccaaatcccatttatgaattagggttatgtgtctcggattcccagacattaccattttcttaagaggacaccgctccttcctcttcaggagacttggggggactcttcgatcgcgacctggatttggattccctcttggacactgggggaggactcctggaccgagaccgggacctggaccgcgaacgagatctggagaccgacgaggacttggacttggaccttcgtgcggatctggacttggaggtcgaccgagatcgagaacgagtgcgggaccgagacttcgagcggctgtagcgagatcggctgcgagacctggaacgactccgactccgggatcggctgcggcgacgccgcctagggctgcgggcgggacgagcaagcacagcggggttaattccaggcagcggggccggccccgcccgcgcgctcccgcccaggccgccattatctcgccgccagacgccatttccccagtcgcgaggcggggtcctccgccccgcgccgcccacaccccggccactcccgggtcgcagacggcggaagctcgcggggtggccggagggtcgcgagacgcggcgtgcacccccgccccgtccgggcccgcaccacgtgcttcgccgcggacctttgtgaggtcgcccgggcctcccgcgcgccccgccccgcctcccgcggtcccctcagccccgtttacctgcggctccggcgtccgtagccaccgcccccgtacctgcggggtggcggtccccggcggctgtggtgtgagtccggggggcggccgtagcgcgccatttgcacccgcagctcgcggccgtccagcacggccccgtccatggcatccatagcgtcctcagcgtcgcgcttgtcgtgaaagcgaacgaaggcgaagccgcgggactccttggtgtagcggtcccgcgggatgtacacgtcgccgacgcgcccgtacttctcgaagacgcgcctcagcgtgtcgggcgaggtgcggtaggtcaggttgtccaccttgagggaggtcataccctccacatcgggaggggggcggccgtagctcatagctctgagtggcggcccggagccccgcgaactggcgccggcttcctcagctctgggcggtgcgacgccgcgcctctcaggcagttgccttccgcgtggggacactgggaaaggccttgccgcagaacagcacggacgggctccgcaggctagcgcacctgagtaacaactgggcgggcagccggcctctgcgcccgtttatatcgctcctcacaaaatggcgcccgcgccacccggaaatgaaaccttctgattggcccaccgcgccccgcttcgtaacgaccctgccgcgcgccccgcccctacccgaagcgcctgcgcacagcccggcgggcgggccaaaaagcgcggagtcacggctggagggagggggagcggaattagcgggcagttggaaagcccgcgaaacgctttttccgcctgggaggccggacgatcgcgattgggcaggaggaagaggaggtgctccccatctgggcccccacctttttttcatgccaatactccaagttcacgccccttttttgctcagccgtcagccccgtctccgtctgaagagtgcttctgccctcatttgcctctccctgtgaccccggccccctcagactccgctgcgtcgtctctcggccccgtccagccgttcctgactgctcttcgccggagtccgcttcccaaccccctttcgccagagcccgagagctccgtcggctctgcgtcctggcggtggggactccccgcggagcgcttgcgcgtgccaggccacccgggactacgtttcccagcgggccgagcggccggcgccgcggctgcggtcaggtgacccggtcgcctggccgcagtgagtcaggctgggagggcggggccgcgccggctgctgcggctggcacttggccctttaatccccttcgtgggcccctcaacctggagcggataaattcttggcgcttctccgggggttgtgctcttccgtactcggatcgcttcttaggagtatcctaactgccggtggggagaacttcgccctaaacctggggttccgatccaggaactggaagttgacagcttggctgcctggctcctgcatctgccttctccactcaccatctcatttctttctccaggattgtcagtggcttcgccccgaggagagctgactgccctgggctgctgcctccggcagagctgagccaaaatgtccccggaatctaaaaagcttttcaacatcattattttaggagttgcctttatgtttatgttcactgcctttcaaacttgtggaaatgtggcggtgagttggaatctgtcctccctcctttgaagtgcccatcataatgcagtccagaaatgaaaataaacgttcattatatctaatagcgcgctttaattgcatctttcatttttcccacccagacttcctcattttttatgattaggtttgatttcttgtgtcagacatttctcatgggggcgttaagcattatcgtttaatctgatttgattaggggtttggatgttaacctggttattttgtttctcgtctgtattaagcgcttccttagtacttggatggttacagctgcttttcctcccccctccctgtcattggtttgccttctgcagttctgttgtcctttttcttttctcataatggacttcagtattaagtacattatgaacttttactttattctcttgctgagtacttggagtcacacttcccaagggtgggagggagactgcaaaacattttcgttgattagttttatcttccacacagcaaactgtcatcaggagcttaaataggacagattttcacggcagtggatataccaggtattgtaccgtatgattgattttgctttatatttgacagtagttgcttaaatctcatcagaatcaccagcaatagaatattgtgattgaataagtggtgatggcattttctcttctcagtgcctagactgagagaacataatagaataaagctgatgagtttaggtttcctgtggaattaggcactaggtttgaaatcctgactctacaaggtatttattgcattgttatcttaggtaagtgtttccgtgagcctaatttcctagttcagacaatgcatgtaaagcacttggcacagtgcatggcattgaataagcactctagtattgtcatgattagaattcccagtcctatagaagatgttgtgattcttgaaacatttggtccttctgtttttgtaattcatgacgattaatatacgtatgtcaggagcttttagatttttgttaaggtgattagtcccaattttacagatgggtaaaatgaaaagaccttcacaagtcactagaaccttgtgattggacctgagaatgtaatatgtacaggtatatatacacaaacaggtttttcttttttaaaattagatttgttaattgacaaatgaaaattgcctgttatttattgtgtacaacatgttttgaaatatgtgccatggaatggctacattgagctgtagaaacagtttcttaatttctctagagttagagattggatcgtggcactcccccgccccccacaaacccataactcatacttggttctttttccctatcctaagccttgtatgtaatatttgagaatgaagggatgttactgttcatttttgtaagtgattagtagcacagctttttctacttttttgtcttcatgtgtattctaaagaacaaatgcggccgggtgcgggggctcacgcctgtaatcccagcgctttgggaggcggaggtgggcggatcacgaggtcaggagatctagaccatcgtggctaacacggtgaaaccccgtctgtactaaaaatacaaaaaaaaaaaaaattagccaggcatggtggtgggcgcctgtaatcccagctactcgggaggctgaggcaagagaatggcgtgaacccgggaaggggagcttgcagtgagcagagattgtgccactggactccagcctgggcgacagagcgaggctccgtctcaaaaaaaaaaaaaaaaaaaagaacaaatgcaaaaacacatttgatatttgagagattcataaaagccaaagaataatttactttggatttatgaatagtatctagtaaatgaattcagggcctttgaaatggttttaaccacacttcgtacaagacatatgtactagggctgggtcaatagtaactgagtaataatgttcaagtgagaccattaggttgagttaaataaattctggcttaagcaagttgtagctctgcgcttgttatttatagcagagaaatgtcatgacgctgccagagttgtaggctaagtttgtagggcagattggtggactggggcctctggagtcatgcagtcctggctcgacattcaccagccacccagctggacttttggcaaattacttaatcccactgtatttcctttttcttttctttcacatgaggataataacaatatctttctcctagtgctgttaggattagaagagaaaatctgtataaggtacttggcacagttcctgttactatgacttaccagtatgtaaaaaatgtattgtaggcagactgatcccaaggcacagttggtgggcttcaatattttgtacaaatgaaaacttttatatggtattgaattgaatgatataactatcataaattctgactaaataatatgagtgtttattgtaaaatctataaacaaatggattttaaacagtgacacagcatataagggctttgttcttttttttttttttttccgtttgtgtattatgtgtgcagcatggctattatctatggagtgttctctgcttcaaatttgattacaccgtcagtggttgccattgtaggacctcaactctctatgtttgccagtggtttattttacaggtaagtagtgtaatcttgcacttatttaatcagaacacttgtcaggatctttcaagtagatagtaaacttcacaataatttatagacttggactgaatagaatataggtggtattttacgaattttggctcagtacttgttgctcagggatatcatattctaatgtgataggatgtatctatatctgcttttgttttattgttaataaaaatagtatccaaaagtctctatgagggttgaaaagaacattctatgaaataatcttattttctgtcaattgactgaaaatatgtggggattcaaatgaaataactaaatctttctctgaactctagaactatagttccatgatgtgctaagcttttggcaaagaacactgcaaacctgtaaaatgtctgattttgcaaatctgaaataataaattatgggccaggcacagtggctcacacctgtaaatcccaacactttgggaggccgaggtattgcttgagccaaggatcacttgggtccaggagttcgagaccagcctgggcaacatggtgaaacccttgtctctaccaaaaataaaaaaaaattagccgggcttggtggcacatgcctgtagtcccagctacttaggaggctgaggtgggaggatggcttgagcccaggaggtggaggttgcagtgagctgtgatggtaccactgcactccagcctaggcaatggagtgagaccctgtctcaaaaaaattaattaattaagaaatgagaaagttgattgtgtcccttttttcaaaactggagcgatcctttacaggttgagttttaaaagaagagaatgtcagaactgattcctagaaggcataattggcattctatttcaggtatcgtttgactgtaataccttgacctgttatattttagcatgtacattgccgttttcatccagcctttcccgtggtccttctacacagcctctgttttcattggaattgctgctgctggtaagcattttgatttttaacttctctgctttcttttctggggcctatctaagggtattatttatgtgtttagtatgtgactctaagtgaatttctttcccttgataaacttttgggttgaattttagtgctttggacagcacaaggaaactgcctgacaatcaattcggatgagcacagcattgggagaaacagtgggattttctgggcacttctgcagtctaggtaattatccttttgaggttcagtctttccttttctttcttttttttctgtcataccattttttaggtctttggttgacaatttggatcttccatgttacgtgacttaagttctagctaaatgtgacgtgattccaattttatagaatcacttgtaataatggctgagtatggtggctcactagctactcaggactatttataccaatactgaatatagcatactaactttttttttttttttaaatgagacggtgtctcacactgtcacctgggctggagtgcaatggcacgatctcggcttactgcaagctctgcctcctggattcaagcaattctcctgccttagcctcctgagtagctgggattacaggcgcccaccaccacgcccggctaattttttttgtatttttagtagagacggagtttcactatgttggccaggctggtctcgaactcctgaccttgtgatccgcccgccttgggctcccagagtgttgggattacaggcgtgaaccaccgtgcctggccttaacatttttcttaagaagaaagcaaaacagctattctgctcttgactgttggatttctggaatctcttctgaggaatcaccctcatgaatcgcgcctaaaattttggccttgacaaggcttaacaaatgcaaatgttacattttaaagagttgtatattaagaaactagtgtgtaagtgaatgatttttcaggaaagtatgctaaagaaagtatttgattagatgcagataactaaatcatggatttttagaaacagattctttaaaatttagcttaagcttatttccagggagtcatttccagagttgcaataaatcacatgtttcaaagtgagtcaattcttctttgaagggtgcctctgaatcaggttactgtcacatggaaggagactgaattccatctggggcagttaagtttatcagagtccagatgaagctgatacttttaaatgacccaggacaggtagatactttaaaaatgatgtccttctctctccctctcttacaacaaataatgggaataattatttttaaaaaactataaatattaaaataattacccaacatcctatcctcccttttcttcccccagcttgttctttggaaatctctacatatattttgcctggcaagggaaaactcagatatcaggtttgttttattcgcgttgctttattcagatatgttcaaagcataataggagttatatagaaatacccattattgctttattcaagcatcgttctcatgaaccccgacacctcaagttctcgcagattttagcttttagtaagacttttccttggtttatattattattattattttgagatggagtttcactcttgttacccaggctggaatgcaatggtgccatcttggctcaccgcaacctccgcctcccgggttcaaacagttctcctgcttcagcctcccaagtagctgggattacaggcctgcaccaccacgcccagctaattttgtatttttagtagagatgggtttctccatgttgttcaggctggtctcaaactcctgacctcaggtgatccgccctcctcagcctcccaaattggtggtattacaggcctgagccatccctcccagcctggtttctattactaaactaggattatagtttatgactatgctttaaggggcttctcagggtctaagggaaggttatgctgtgcacgagcttacgagaatactgcgcacgagtatgtggttctcagaagacttctgaatgctcagttgttttctctggacccttctttgattaaaagaaggcgattaagcccttgtgctgtttttctttggcttattcatatttctctaactgaaagacaaaggtgaaggtatcctatttgtctccttttcctaggtttttactgatgcattaaagtaaaaatgtaacgaggaagtgtgttgacagttgtaagcagcccttgtaccgtgatactaattctggaattgtttggtcgatactatcttgtttcttcttttttctccgtagagagtgaccgaagaacagtgtttattgccctaacggtgattagccttgtggggacagttctattctttctcattcggaaaccagattctgaaaatgtcctaggagaagatgagtcttctgatgaccaggacatggaagtcaacgagtaagatgttggaaacattctattttattttaaaatagattttgagtagatctagtctagagattaccaacccgtttagccctaactgatgtccagtactctctgtaggttaccacaggcaagaaaaggaagaaaataaaggaggagctgcgagggaggaagaaaaaaaaggtcaccagaggaagggaggtggtgaaaaggtgcacagggaagttgagtctgttcctggccttgccactgatgtgtgtgaccctggacagtggcagcaattcctttcatgtctccaggcctcagctttctcactcaatccatatgtttccatgggcaaggaaatagaaggcagtgttgaccttggttactgtttctgtgatccagctctaaagctttcctgttcttgtggtgtgagtgagtggcagggccagtgatggttgtcacagatgaaccttggttatcactaggctcttgcttatggtgtccggctcttgcactaacttacataggcggttttccccagagtggtccaaataggggaatgagtatacaaccctgtgttttgtaaaaattgtaaattacctaagcacatttcagtttcaggtgacactatttaagcatgacaggctagtgatctgcagtatcatttagatttgaggaaggagagatgagaaattaatctctgccacccttgttttgctttgtttgtgatacattgtgaagattgccttatagcattttatatattgttaaaactttcgcattgagcatcccatgctgactttgtaatccagaaagggcctaaaattgtccagtcataggagcattagatgctccagatttgcagtaagtttgtgtaaagcagaagcaaggcagcgctttggtctggatatgctgccatgccctgctttcttgctctttattgtgcttcacagacactgggttttttacaaattgaaggcttgtggcaaccctgcatcgagtaagtctttctctccataccacttttccaacagcgtgtggtcactttgtgtctctctgtcacattttggtaattctcacaatacttcaaacatttcattcttatgacatctgttataagatgtgatcggtaatctttgatgttactattgcaattgttttggggcaccacaaaccagatccatataaggtggtgaacttaattgataaatgttgtgtgtgttctgactgttccactgcaggccatcccccatctccctccctcttctcctgagacacagcaatattgaaattaggccagttaatgaccctacaatagcctctatgtgttaaagtgaaaggaagacatgcatgtctctcactttattatttacttatttatttatttatttatttatttattttttgagacggagtctcgctctgtcacccaagctggagtgcagtggcatgatctcggctcactgcagcctctgcctcagcctcccaagtagctgggattacaggcatgcaccaccacacccggctaatgactaatcaagaaatgactaagcttagcaaggaagacatgtagaaagctgagacaggctgaaagctatgcctcttgtgccaaacagccaagttgtgaatgcaaaggaaaagtttttgaagggactcaaaagagctactccagggaacacacgaatgataagaaagtgaaacagccttattgctgatacggagaaagttttagtggtctggatagaagatcaacccagccacaacattctctgaagcctaatccagagcaagtccctctcttcaattctgtgaaggctgagagacgtgaggaatctttagaagaaaaatttgaagctagcagaggttggttcgtgaggatcaaggaaagaaaccatctccatgacataaaagtgcaaggtgaaacagcaagtgctgctggagaagctgcagcaagttatccagaagatctggccattataattgacaaacgtagctgcactaaacaacaggttttcaatgtagaccaaacagtcttacattaaaagatgccatctaggaattttatagctagagagaagttaatgccgggctttaaaccttcaaagaacaggccgactcttgttaggggataatgcagctaatgacttgaagttgaagccagtgctcatttaccattccagaaaccctatgacccttaagaatcatgcttaatctactctgcctgggctctagaaatgcagtgacaaagcctggatggtagcacatttgtttacggcatggcttattgactattttaagcccactgttgagacctactgctcagaagaaaaggttcctctcaaaatattactgcttattgacaatgtacctgatcagccaagtgctttgttggaggtgtacaaggagatgaatgttgttttcatgccttctaacaacatgtgttctgcagcccctggatcaaggagtaatttccatttttttttttttgagacaaagtcttgctctgtcacccaggctggagtgcagtggcgggatctcggctcactgcaacctctgcctcccgggttcaagagattcctcctgcctcagcctcctcagtaactggcattacaggcgtgcaccaccatgcctggctaatttcaactttcaagtcttattatttaagaaatacatttcatgaggatatagctgccatagataatgattcttcagatctaagcaaagtaaattgtaaaccttttgagaaggagtca[136 bp omitted]catggtgaaactttttttttttttgagatggagtctcactttttcacccaggctggagtgcaatggcgtagtcttggctcactgcaacctctgcttcccaggttcaagtgattcttccgcctcagcctcccgagtagctgggactacaggcacatgccaccatacccagctaatttttgtatttttagtagagacggggcttcact[140 bp omitted]ggagtctgtgaaagtgaataccacaaattcaatgaaaactgacccccccattcagccagcacatgtttggtgttggtcctagaggacaaatgccgcccatccctgtttttaaggaactgccaagttggggaggtggatgaggggttctgtaactgtgagctggcgttcttctagaaatactgctcagcctttgtagcattctctcttcctgaatcgtctcctaaatttggagcttctgtgtctttgttctacaaatagcacagacttgtggcagccctcttctatgcctgagggatataggcgtgaacaagacagataagtccttgttcttacgggacttaattttagagggggtggtagacaatgcacgtgtaagaaaatagcaaagtgagtgttaggaagactgtgaaagagggggagagtgggggggaggggggagagtggggtggctccctgagacgtggctggtgagacatgaaggtcagcgggtggcctttgccaaagccaggcagtgggaagggcgtggtgggctctggtctccaagaaggaagaagtggaagcagtagacagggtcagattatgtaagccaagataggaggtttgtgttttcttcttagtgtgattagaagctgttgagggtataagtagaattctgttttaaaggttcccacctaaaggcctcacagaaaaagatttgaagaggtccaaagagacagctctgtctgtcttctggctgggcacagtggctcctgcctgtaatcccagcaccttgggaggctgaggcaagaagatcgcttgagccctgtttgaaatcagcctgggcaacatagcaagacctagtctctacttaaaaaaaaaaaaaatgagccaggtgtggtggtgcacgcctgtagtcccagctacttgagaggccgaggtagggggaagcttcagcaaagggattcaaggttgcagtgagctgtggtcacgccgctgcactccagcatgggcaacagagcaagaccctgtcttaaaaaaaaaaaatctgtcctctatctcaagtgcgtaatttgcatctctgaggacttattagctgggtgatctctgggtgtttcttcattggcagttacttctatcctccttctcccctcctccctgtattctttccttcctctcttctttcctccctctatcctttcacttcttaccttcctgcattcatcctttctttcccttccctctctcccaccctcccttcctctctcccttcttttcttccttcccctatatttgaggttctctgatattccaagcattgtgctaaataaaacagaagtttgtgcattcatggagcttactttctagttggtgacagagagaaaagaaacaggcaggttttaaaaatagctttattgagatataactcatatactatataattcacccatctaaagtatacacttcagtgcttttgagtatattcacagagttgtgcgtccatcattgaaaccaattttagaatattttatgaatacttttattaccccaaaaaggagccacaggatgaatgtgatggcccatgcttggcctgtggttccttttccaggtaataaaaatcatagcactttgggaggccgagacaggcggattgcttgaacccaggaatttgagattagcctgagcaacatggcgaaacaccatctctaccaaaaaaaaaatacaaaaattaatcaggcatggtggcgcatgtctgtgctcccagctacttgagagactgaggtgggagaatcgcttacgcccaggacgcggaggttgcagtgagccaagataatcacaccaccacactccagcctgggtgacagggagagagcctgtctcaaaaaaaaaaagaagaagaaggaacaatgtatgctgtagcctatctccatatggttcttgaaataaaaaaataaagcaggctggg[135 bp omitted]tggtggtgtgtgcctgtaatcccagctactcaggaggctgaggtaggagaatcgcttgaaccagggagttggaggtggcagtgagccaagattgcaccgcagcactccagcctgggcgatagagtgagactccttctcaaaaaaaaaaaaaaaaagcagagaagcaatagagaaatatgagggtgggaggtggaaggggagctgttgcagttacagagttgggaaggctgagaaagtaacatttaagtcagggcctgaaagaggtgagccaggtgtggcttttacctggagtgggatggtaagccattggagggttcgagagaggactgacagtggtctaacttaaatggtaaataactcactgaattaaattggaagtgatttgcagctgaattattgtattttagtcgtctgtagagtataaatcagttaattggggcctgaagggtaaaatattggaatcctacatgggatcctatccaagtataaaatgagggtactaccaaatgatggcatctaaatagtatttgcttccgggcaaggcatgagttttatgatgagga[167 bp omitted]tgagtagctgggactacaggctcctgcca[187 bp omitted]tccttttatttcttaagttaacaagatcttctttacattacttttttttggtaaaaatgccatttagagatataggagtagacttggctattaggataggaaatgtaatcttttttttttttttgatacggagtctcgctctctcacccaggctggagtgcagtgacacggtctaggctcactgaaacctccgccttccatgttcaagtgattctgctgcctcggcctcccaagtagctgggattacaggcacctgccacacctggctaatttttgtatttttagtagaggtggggtttcaccatgttggccaggctggtctcaaactccttacctcaagtgatccacccgccttggcctcccagagtgctgggattacagg[135 bp omitted]ccatctctactaaaaatacaaaaaaattagccaggcgtagtggcaggcgcctgtagtcccagctacttgggaggctgaggcaggagaatggcgtgaacctgggaggtggagattgcagtgagctgagatcgtgccactgcactccagtctgggtgacagagcgagacattgtcttaagaaaaaaaaaaatctttctaggatgggtgtggtggttcacacctgtaatcccaacactttgggaggctgaagtcagaggatcactgagcccagagttccagaccagcctggcaaccttgtggaatactgtctctgcaaaaatttaaaaatcatgcctgtctctacaggcatggtggtgcatgcctgtagtcccagttactcaggaggctgaggcaggaggatcacttgagcccaggaggtcaaggctacactgagccatgattgtgccagtgcattccagcctgatgacagagcaagactcggtctcaaaaaaaaaaaaaaggaaaaagaaaaatctttaaaaattaaggaaaaaatattttttaaaaactttcttataatcttattaacaattatgcttaacttgcattatcttatttaattcccatgggtaagtcgtagcatccctatttgatgaatgaggaaataatacttggagaaatgaagtcacttgtctaaaatcacacaactaattagcagcaaagccaggcctctgactccaaagcccttgtttcaatcagtagatcattgtgcgtcccagccatgtcacaaggagggcattcatgattctgaagagtgttattgaatatgattctagtataattaaaaacttatttctccaaaggaatcatagaaggaaatgtctgctttgtgaaaattgcagattaatgaaagcaaatggtatcaataagaactctgccatcctcagtattatagctcaggcgtgttgttgctcagtcctcagacagctgcagttgctctgtgtatcaccttatataacccacttccgtttcccattgaagagaaaatgaggcataggatgtacaatgatctaatgttaggcacttccttgacttcatcaatcttggtggatgaataagaaaaatacgttttaagctttggagcatgatttcaagcactcagtagtgtttcggcagtagtcttggtaaactggaaaagtcagggatttttttttttttttttgagatggagtcttgctctgttgcccaggctggagtgaagtggcgtgatctcagtttctgggttcaagcgattctcatgtcagcctcctgagtagctgggattacaggggtgcaccaccacaccctgctaaatttttttgtatttttagtagagatagggtttcgccatgttggccaggctgatctgaaactcctgacctcaagtaatccaccctcaagtgatcagcctgccttggcctcccaaagtgctggggttccaggcgtgagccaccacaccctgcccaagtctgtgatttgacctgccttgtatggataaataaaattgcaggttgcgacgaagacccacctctctcagcagggcaggagataggcatgaatccttgccttggtaatcttcctgaggtaaatattagtacagattttaaaataaccttcccttttaaaacctgagatttgatgacactgttggtatagaaacatataacatataaaaatcttgtgctcacttcggcagcacaaatactaaaattggaacaatacagagattagcatggcccctgcgcaaggatgacatgcaaatttgtgaagtgttccatatttaaaaaaaaaaatcttgttccataaaaaaaaaaaatcttgtcacatgttggttacagttcccaaaaacacttcatcagaaagcacatagcagtcgtcacctgtcagtgcttgaattttgatgtgaagccaatcgagagtacagtacctgtcaaagtctcttggttctcgatacccaaacagtcatagcagcaaggagatgaatgaaagctaacttcaagaaagccttcatgataccacatccaaagtaaccacctcaggatgcagaaaataacaaaagtctctgacgggttttaatgccaaagaacttatttttcatagtaagggcggtagaaaattgagtactcacagattattttcagtttgaaggtaacaggataggccgggtgtggtggctcatgcctggaatcccagcacttcaggatgctgaggcaggtggatcacttgagctcagaagttcaagaccagtctggcaacatggtgagaccccgtctctaccaaaactacaaaaaattatctgggtgtggtgggacccacctgtaatcccagctactcaagaggctgaggtgggaggatggctggtgggaggatcacctgagcctgcgaggtgggggttgcagtgagctgagattgcatcacagcactccagcctgggaggtggagtgcgaccctgtctcaaaaaaaaaaaaaaaagaaagaaagaaagaaagtgaaagtaacaggatagaaggtatttctgtactgcctgaagtatcatttctgagaaagacgtgcataaacatgtacaataagtgtaatctgaaagaatagtcttccaatagttgatagagaggtgcccaggtgggactttaaaaacctgaagcgagggtgtggccatgagggacaccctgaggcaaggagcattcgagtcactgggaatgcatctcagacctggtataggacagggtttttacgaacgtaaatgaaaatgtgatcgtatgtttgttcttttattttcaaaaagaaaaaacttattttttacattttattttctcaggtctgcccagaacaatctgacaaaggcagtagatgcttttagtaagtattttctgtatctgaaatgcaagaactgttcaggaacaactcggcatttgcctttcccctattccctggtaactttggattgatgacaccccagggtttgcatttttccaggtatgctgctctgaaatatattgatcttccttatcaacatctctctaacatgggggttgtgagggatggatgatggtatgactgcccacctgcccaggtgtgtgagggaagtggaaagaggctgcatagcactcaggttctccctgaagttgagagtcttcctgggatttttgcagggtaattaagagcagattgtggctgcgcgcagtgactcgcgcctgtaatctcagcactttgggagtccaaggcaggcggatcacctgaggtcgggagttcaagaccagcctggccaacatggcgaaacctcttctctactaaaaatataaaaaatttgccgggcgtggtggcatgcacctgtagtcccagctactcaggaggctgaggcaggagaattgcttgaacctgggaggtggaggttgtagtgagccgagattgccccactgcacttcagcctgggtggcagagggagactccatctcaaaaaaaaaaaaaaaagagcagattgcttgctacttcttggagcaaagcagtagctccagtgacccagaaggtagtaagaataatcatgttcatgcattgagaagtcttcctggccaaagactctgctgaattctttgttttttactctatgtaattctcacaattctacgagtattatataatacacacctatcattgtctcagtttaacagaacagaaaactgaggcttagagaaattaaataatttaagggccaggcatggtggctcacacctgtaatgccagcactttgggaggtcatggtgagtggatcacttgaggtcaggagtttgagaccagccaggccaacatggcgaaaccccatctctactaaaaatacaaaattagtcgggtgtggtggcgggcgcctgtggtcccagctatttgggagactgaggcaagagaattgcttgaacccaggaggtggaggttgcactgagctgatatcacgccactgcactccagcctgggcagctgtgagactgtctcaaaaaaaaaaaaaaattaaataatttacccaagatcaaccagttagtaggtggctgaattgggatttgagccagattctcttaatttccttcagaaacttccagtgagtcccttttgcttctgcctatggctctctcagcttctttgtcttctcaggagagggaatctgactggggcagttattctcaagaagagagcagccttttgagaccatgtatattcattaagcctattgtaggccacagggcgttaatgacatgtggcccttatggcccttgagtacttatgattagtttctaggttgccttgggctggagtgcagattcttgatctaatcagccatggcctggctcagatgacacaaagcttgttaactcttggccagaaatgcctgtagcttgtttttttagaaaaggtctatgagcatgggagtctgagccttctatacgtagtatattgtttcaggaatatattcatagttttttacatatatatatgtgtatatatatgtgtatatgtatatatatgtatatatatgtgtatatgtatatatgtacgtgtgtgtgtgtgtgtgtatacatatatatatatatatatatattttttttttttttttttttttttttttgagatggagttttgctcttgtggcccaggctggaatgcaatggtgcgatctcagctcaccacaacctccacctcctgggttcaagcgattctcctgcctcagcctcccaagtagctgggattactggcatgtgccaccacacctggctaatttttgtatttttagtagagatgggatttctccacgttggttaggctggtctcaaactcccgacctcaggtgatccacccgccttggcctcccaaactgctgggattacaggcatgagccactgcacccagattttttttttttttttttgaaacagagtcatgctctgttgcccaggctggagtgcactggcaccatcttggctcactgcaacctctgcctcccggattcaagtgattctcctgcctcagcctactgagtaactgggactacaggcacgtgccaccacgcccagctaatttttgcattttttagtagagacagggtttctccattttggccaggctgttctcaaactcctgacctcaagtgatccacccgcctcggcctcccagagtgctgggattataggcgtgagccaccacacctggctcgggaatgcatttataattataaattgagccacacgtgataattaaaaggattatactctgactcccttagcaaggtaggaggtcaatcactgtcaaaagtttggctttcatctttgcaggcctagaaacttgtctgtcagaatacccattattaggccgggtgcagtggctcatgcctataatgccatcactttgggaggctgaggtgggaggatcacttgaggtccggcattcaagaccagcctggccaacatggtgaaacccatctctactgaaaatacaaaaattagccaggcatggtggcggatgcctgtaatcccagctactcaggaggctgagg[131 bp omitted]acagaggccagaggggaaaaggactcaagctaaactcatagaaatggcaatttaaccatttttgatggcacttgacatttcttagtgagccctttcatggatatttccttcttgttgtcagcaggctagaaagccacattggcttacttggtgagatcggagtcgttaaagggaggtagatgacctggcttatgggatggtgtccccagccatggtgaagctgctccatcatagatccccctctggctgtctgttaatgttaaccagattcaggacatctcacctagacagttggacagactttgcctcaactctgtctgtaaaaggaggcactgacacattttgggccacatgctttgcattacggagcttgtcagttacttgataggattgatttatcataggatattgggctgtcaggtttgaagagggagaaggtatggcacgtagggtgctgcagggaaagtagactcaggggccagttcctgggcaattggggcacaacaggaagtcgtgaggtggcaagggagccagaggcatagggagagagggagaatgaatggcaaggcttcatgtggcctgtgtgtggccagtgcttcatttattaattaatcatgacattcctgtggttggggctgtgatgaatgttgtacagagaaggttcctacatactatctaaaatcacttacttcccagactgaatttatacgtttagtgtgcttctaaaatatgttcgtaaagtttttaaacattgattttttgatcttgaggaaacaatgctaaagttcttctactaggatgaatgtctgaaaacagccaagaaaatgttctcaggccgggcacggtggctcatgcctgtaatcccagtactttgggaggtcaaggcaggtggatcacgaggtcaggagttcaagaccaacctggccaggatggtgaaaccctgtctctactaaaaatacaaaaaaattagccaggcatggtggtgggtgcctgtaatctcagctatttgggaggctgaggcagagaattgcttgaacccaagaggcggaggttgcagtgagccaagattgcaccactgtactccagcctgggtgacagagcgagactgtgtctcaaaaaaaaaacaaaaaatgttctcaaagaaggcaagagacttatcctagtaaacactaaaacctattgcagattcatttgcaaacatcagaatagcaagaccaataaaacaaagtctagaatcaagcccatgctcatagaggaatataggatacaataaaagtgggtcttaagcaaggttagatagctgactgcatagaaaaataatatagatccatacttcactttatattaaaacttttagtagattaaaggttaaatataaaaatgaaactataaaagtaattgaggctgggcacagtggttcatgcctgtaataccagcactttgggaagccaaggtgatggggggattgcttgagcccaggagtttgagagtagtctgggcaacatgatgcacctctctctctacaaaaggtacaaaaattagctgggttttggggcatgcacttgcagccccagctacttgggaggctgaggtggaaggattgcttgggccctggaggtcaaggctgcagtaaacagtgatggcgccactgcactccagcatgggcacagagcgagaccaggtctcaaaaaaaaaaaaaaaaaaaaagtgattgaagaaaataaatgtaaaacttcagtcaacacaacctaacaaacttgaaacggcaaggaaaatctggggaaaatatttgcaatatgtgataaagagctgttatgaaccaataagaaaagtataaacactccagtagaaaagaggcattttacaaatatggaaaaaattgttacaacttaagtataattgacccttgaacagcgtggggcatggacactccattccacacacccctaccccccacacacagttgaaaatacacatataacttttgactccctcaatacttaactaaggtcactgttcaccggaagccttactgataacataaacagttgattaacacaaattttgagtcaggcacagtggctcacacctgtaataccagcactttgggaggccaaagttgggaggataacttgagctcaggagttcgagaccagcctaagcaacatagtgagaccttatctctactaaaaataaaaaaataaaataaaaattagctgggaatggtggcacgtcccagctattaatacttggagggctgaggcaggagcatcagttgagcctgggagattgaggctgcagagaattatgatcacaccactgcattccagcctgggtgacagagcaagaacttgtcccaaaaaaataaaatacaataaaatatatttctttttctttttttttttgagatggactggcactctgtcacccaggctggagtgcagtggttctatctcagctcactacaatctccgcctcctgggttcaagtgattctcctgcctcaatcccctgagtagctgggattacaggtgcctgacaccacacctagctaaattttttgtatttttctttttttgagatggagtctggctctgtcacccaggctggagtgcagtggcgcgatctcagctcactgcaacctccgccccgcaggtttaagcgattctcctgcctcagcctcctgagtagcagggactgcaggtatgtaacaccatgcctggctaatgtttttttgtatttttgctagagatggggtttcactgtgttaaccaggatggtctcgatctcctgatctcgtgatctgcctaccttggcctcccaaagtgctgggattacaggtgtgagccaccgtgaccggccttttttttttttttttttttttttttttttgtatttttagtagagatggagtttcaccatgttggccagactggttttgaactcctgacctcaagtgatccacccacccggcctcccaaagtgctgggattacaggcataagccacacatattttctatacgtattatatactgtagacttataataaagtcagctagagaaaagaaaatattaagaaaatcgtaaggagactgggcctggtggctcattcctgtaatttcagcactttgggaggctgaggctggcagatcacctaaggtcaggagttcgagaccagcctggccagcatggcgaaactccgtctctactaaaaatacaaaaattagccaggcgtggtggctggcgcctataatcccagctcctcgggaggctgaggcaggagaattgcttgaaccctggggtgggggtggtggcggggcagaggttgcagtgagccatgccacttcactccagcctgggcaaaagagctaaactctgtctcaaaaaaaaaaaaaaagaaaattgtaaggaagagaaactatatttactgtttgttgagtggaagtggatcatctggatcttcatcctcatcatcacattgagaaggaggaggagggagggggttggtcttgctgtcttggttggcagaggcagaagaaagtccgcacagaagtggacccctgaagttcaaacccatgttgttcaagggtcaactgtgtaagtaaagtgcaaattagaagcagttttctttcttttttttttttaaacggagtgtcgggagtttcgctcttgtcacccaggctggagtgcagtggcgcgatctcggctcactgcaacctccacctcttgggttcaagggattctcctgcctcaggctcctgagtagctgggattacaggtgaatgccaccacacctggctaatttttgtatttttagtagaagtggggttttgttatgttggccaggctagtcttgaactcctgacctcaggtgatctgttcaccttcgcctcccaaagttctgggttataggcgtgagccactgtgcctggccaggagcagtttctatcggatttcaaaagataaaacataattctcaatattatgggcggggggacaggtaattatatgcataagactacattgctggccgggcgcagtggctcatgcctgtaatcccagcactttgagaggccgaggtgggcggatcatgaggtcaggagttcgagaccagcctagccaacatggcaaaaccccatctctactaaaaataacaaaaattagccgcacacggtggtgagtgcctgtaatcccaactactcaggaggctgaggcgggagaattgcttgaacctgggagacagagattgcagtgagccgagatcgtgctgttgtgctgcagcctgggtgacaagagcaagactccatcttggggaagactacattgctgatatatacttgtagtactttataaaaagtgatttgtcattaggtatcaaaagggataaaaatgtttataacctttgccccagtggaataaccaatttcactagtaagattatcctcaggaaataattaaatattgtggcaagatctagctactaagatgtttatagtagtgagatactggaaataagtattcaactgttagacattagtacatctatataatagattaccctagccataaaaattatctctgtgaatgttcaaaaaattctcctgtatattacgtgaaaacaaatgataaaatggagaatatatagtagaatttgtttttgtaaaaaatacatagaaaaagactggaagaagattcattaaggtgtt[145 bp omitted]cccatctctactaaaaatacaaaaattagccaggcgtggtggcgggtgcctgtaatcccagctacttgggaggctgaggc[131 bp omitted]ccatttaatcaatctaaagaatccattgcaaagtcagtacaatttattatattcagagtcgtgtaaccatcactttactcaattttagagcattttccctgtgcacattagagtcacttctcattccagcctcctaatgcaacctccctaaggcactcccaactttctcccctttcactactattgcacccattcctctactttgtctatagatatgcttattctggacattttatgtaaatagaatcatacaacatgtggtctttagtgcctggtttcttttaacataatggtttcaaggctcattcatgtcacaatatattataaaatttgagtcattcctatattttatgtattatgagtttcaggggtctgtcctgcagaccctgacccaacaatggatgaataaagtacactgacacacagatattctgctttgccagtttggctgagcatccgggcagcttatagactc[255 bp omitted]cagctagtgagactcacatttattcagtaaatattaattgacaaaggcttgagtcaacaccactagagggtaattgacatcgtggacttcccgagtagaaagcaattaagcaccggcgggaaatcaaaggttagccttaggaccacaagagtaaacaagctatttagataaactccccacattccttttttttttttttaaactccccacattcctttgtttctactgtaatttatttaactaaggggacaaggctgccttcagctaagtttatcactggagcttatgcaaacgccccaggccttccaagaaggtttgcgtcttataattttccccaccatcctgactgaactcccccaatggtaatacataaagttcgtgtacaagtttttgtgtggatgtgttttcagatctctttgatgcacacctaggaatggtggaattgctgggtcatgtggtatctgactgcttagcctgtgggggaactgccagattgttataccactttacatttctactagcagaggatgagtttgtcagtgtttccacgtgcttgcagttattttctgtttttttgttttttgtttttttttttgaggtggagtattgctctgccacccaggctggagtgcagtagcacaatctcgactcactgcaacctccacctcccaggttcaagtgattctcctgtctcagcctccctagtagcgggattacaggtgcatgctacccctcccggctaactgttatattttttgtagagatgggatttcaccatg[138 bp omitted]ttattaatgagttgtaagagttctttatatattctagataaaagttctatatatatgatttacaaatattttctcccattttgtttcagcaaacgctctaggaaaacaaacaaatgttttctcccgttctatagattgacttttcattttcttgatagtatcttttgaagcacaaaacttaaaaaaaaaaaattcccccaactttatcgaggtataacttacaaaaattgtatatatttatgaggtacaacatgtttttgtttttgttttttttttgaggcagaatcttgctctgtcacccaggctggagtacagtggcatgatctcagctcactgcagcctcctcctcctgggttcaggcaattctggtgcctcagcctcccgagtagctgggattacaggggtataccaccatgcccagctaatttttttgtatttttaatagagatggggttttaccatgttggcccagctaatcttgaactctgggcctcaagcaattcgcctgcctcccgaagtgctgggattacaggcgtgggccctagcactcggccacgtgttttgatatatgtatacattgtgaaatgatggtcacactcaagctagttaacatatccatcacctcacatagttatcttttttttgcatgtgtaatgagaacatttaagatctactttccaaccaaatttcaagtatacaatagagtgttattaactgtcaacaccaagttgtacattagatcctcagcactcactcatcctgcctaacgaaaactttgtactctttaaccaacgtctccctatttcccccaccctccagccccggcaaccactatgctactctctgcttctatgagtttgactttttaatattccccatataagtaagatcatgcagtatttgtctttctgtgtctggcttatttcacttagcgtaatgctcttcaggttcatccacgttgccctaaatggcaggatttccttttgtaaggctgaataatataccattgtatataccacattttctttattcatccgtttaaggacacttagttgtttccatgtctttgctatataattaatacacacacacacacacacatatacatataatagtgctgtaatgaacatgggagtgcagctatcactttgagatactgctttcatttcctttggatatatgcccagaggtagaattgctggatcataacatgtttttagtattttgaggaccttccatattgttttccatgttcgctgtaccaatttacatcctcaccaatagcgtacaagggttgtctttcctccacatcctcaccaacacttgttaccttttgtctttttgataatagccatcccaacaggtgtgaggggatgtcttactgtggctttgataaagtttttaattttgatgtagtcaatttgtttagtttttcttctgttgtgtgtgcttttgatgtcctaagattttgcttcaccccaggtcctgaaaatttactcctatattttcttttaaaagtttttttagttttagctcttacatttaggtctgtgattcattttcagttaatttttacatatggtttgagatggaaatccagctttattcttttgcatgtcaatatcctgttgtagtcacgccatttgctgaaaagtctgtttttttgtcactcttgtcaaaaatcaattgactgtagatataaacatttatctctagatagatagatatattcttatgccagtaccatgctgtgttgaatcttgtatattttgaaattggaaagtgtgaatcctccaacttt[132 bp omitted]ctgcagcctcaacctcccaggctcaagcgatcctcccatcttagccttccaagtagctgggactataggtgtgcaccaccatgcctggctaatttttgtagtgttttgtagagacaggatttcgccatgttgcccaagctggtcttggctcaagcgattctcccaagtcagcctcccaaattgttgggattataggcatgagccaccaggtctggccatgaattttaggatcaatctatttctgcaaatagattgatgggttttttaatagactttattttttagatcattttatgctcataacaaaactgggcagaaagtagagttcccatgtggcccctataccacatgtatggaacttccctctgttattaatgttccccaccagagcacatttgttataatgagcctacactgacatgtcgttatcacctaaagaccatggtttacgttaggattcactcttggtgtggtaccttttatgggtttgtacaaatatataatgacatgcattcatcatgataggatcatactagataatcttttagaatttctttttgttagctaagtcttctgatttttctaaaatgaacatgtggccaggagtgatggctcacgtctgtgatcctagcactttgggaggccgaggtgggtggatcacctgaggtcaggagttcgagaccagcctggccaacatggcagaaccccttctctactaaaagtacaaaataattagccgggcatggtggtatgggcctataatcccagctactcaggaggctgaggcaggagaatcgcttgaaccctagagggggagg[131 bp omitted]agttttttaagttaaaagtattgttttaaactttgcactggttgtgtatttttttgctggaaatacttgaaaatgattggtacaaaatgtcttcttatatttattcttagtatagttcagtgaaattagagaaaaaagtatcctttcttacatatggagagatttaggccagtgtttgtgacttaggtaagtttcgtggccagcagatatatcacaattaaaatctggatccactgttagttttgtgtactagagtagtggtccttaaattatgaaatgtgaataggttccaaaaaagtcagttaaatgtggagtttttagaaatgcattatccattgcagatttcaactaaataaacagtgtaaaagcaaacattaaagtgactagaaacaaatatgcacaatgcaagtttcagtcctcagagctacagagtcagaatcttgggaagtggtgcccagcttctgtatggccaaaaagctgccctgtgattctgatcttgagtccactcttaaagctgctccatgataattctttagggaagtcagtgctttgctgattgttgactctctcaagagcctaacggttaatcatgccttttgaagtactttgttgttttgtttgattctattttttttcttccttttcatgtttttgttataagagctggaaaatgtgctgaggaaatgcatctgtagaatgtatttaagcacttgaaataaacgttttatttatagggcaaatgtagttcatgccttaagcattttaatctgaaagttatatcccaaagtgttcgtttactggcattattgacaaggggtgttttggttgaaggaagttttagaatgtttgttttattaactaaaatctaattaagtactcttaaatttttgtgtttacagaaaagtcttttaagttatgtgtcaccaaggagatgctccttcttagtattacaactgcttatacaggtaatggaattactgttcttattttctcttgctgcataatgacaataaggagttgaaaacgagccacgttattatttctcacaattctgtgcagtgactggactcagtgaatggttcttctcatggtgtcacttggggtctcttgtggctggtttccttcacgtgtcgccttcactgtggtcagatgataggctgaatatctctctttttgtgtagtctcagagctgctctccatctccacgaccccctccataagatcaccttgtgatctggcaggatagccagacaccttagttaatggactgatggctccaaaaaaggcaacaggaaagaataccagaccttcttaaagctcaggcttcagtctagcccagcatcacttctactggattctgttggtgacagcaaatcacagggttggcccaaattcagtgtggaaggattccacacaaggttcagaaaaaccaggacacgtggctctttgggaccagtggttttaggcaatgcagagcgctacagaaaataaccat[136 bp omitted]catggcaaaaccccatctctactaaaaatacaaaaaattagccgagtatggtggtgcatgcctgtagccccagccactcaggaggccgaggtgggagaatcacctgagctcagtaagtcaaggttgcatgatccaagatggcaccactatactccagcctgggccacgggagtaaagacctccgtctcaaaaaaaaaaaaaaaaaaagtcatttctaatgaaatagaagcatgtcataatgtggtatgatagcaggcggggtacccttaagtcaagaatgataaagaaatttgttttcttttaaaaaatgctgtaatttgctagttaatcttttcccttatgtgcctcatagatacaacatatttttaggtgaaatagaataaacattaaacatctttaaaattcacagttaaggttttgtagcattagggaatcaaggtcccctactgatttactctaattttttaatctttggaattttcttttcctagaaaaaggggtttaattaaaacattatggtgcttttaagacacattgtatagtatgtattggctttccattacagtaagaatataattgaataggggctgggcacagtggctcatgtctgtaatcccagcactttgggaggccgaggtgggtggatcacctggggtcaggagttcgagaccagcctggccaaaatggtgaaaccccgtctctactaaaaatacataaattacccgggtgtggtggtgcatgcctgtaatcccagctacttgggaggctgaggcaaggagaattgcttgaacctgggaggcagaggttgcagtgagttgagatagcgccactgcactccagcctgggcaacagagcaagactctctctcaaaaaaaaaaaaaaaaaagaatgttcctgtttctttggaaagctactaacaaggttaatgagcatgttagtcttcactgttacaaagttatgttaattatcacctctgcccatctccgcctgcatggagagtgataggttttaacataaggatatctgttcatttgagttgtatacttttacctgaaatatatggcagatgccgtcttgtggtatcttaattttagctgctataacaaatttccatagactgtgtggcttaaacaacagacacttatttctcacagttctggaggctgggaagtctgagagcaggatgccaccatgcgcagcttgtggtgtgggctgttcctggttgtagacagctgccttcttgctgtgtcctcccatggcagagagcagacaggaagcaagctttttgttgtctctatttataagggcactaatcacatcgagagggctccaccctcatggcctaattgcctccaaaaggccccatctccaaataccatcatgttttggggaatttgagtttcaatatgtgaatctggggaggacacaaacatttagtccatagcatgaagctaattccatttcatcagttacatcacattatgctctgcttggggattaatatttcagtctctgtgagttttatgtgttttactacgcaagtattctttcgtcagatactactagatgggaagataaacaaaaatgtgaatatataaatgacatctgttttttttctttaactaaaggtctggaattaactttcttctctggtgtatatggaacctgtattggtgctacaaataaatttggagcagaagagaaaagccttattggactttctggcattttcatcggcattggagaaattttaggttggttttaaaaaaaagcgtttgcattaaaaatatcagtttattataggtaaaatagaaattttaagtgtgcttcacctttgtccttgaatttctgttttttctacttatttttacccaaacgtgtgtttttatttttctattattgctattctttttctttttttttttttttttccagacagagtctcgctctgtcgccgaggctagagttggagtgcagtggtgcgatctcagctcactgcaagctccgcctcccgggttcacgccattcttctgcctc[212 bp omitted]ataaaacatttgcaaaataattcacagatggaaaccctgtgtaagaaaacatacaatgtctcccgacttttcctcctaaaatatttagaaagtcttggaattcctgactctggttctctgattccctgtcaccaactgggtgtccaacagctcaatcctgttctaacacttaactctccaaagttagtgtcagattccacaggtttaagggttcagtcctacagacagacagtctgggtccataggcctctcaggcacacctctctgacttgggtacaaatttggaggttcccatagccctcttcccccttcatgtttgataatttgctagagcaactcacagaactcaggaaaatgctctcctgactattagagtttattataaaggatacagatgagcagcctgatgaggaggtgcaaagggtggggtctgaaagggtccctaagtgcaggagcctctgtctccatggattttgggctcaccactccagaagctcctccaaccctgtttagggggatttatggagatcctgttacataggcatgcttgattaaatcattggccacatggccgggtgcagtggctcattcactttgggaggccgaggtgggaggatcacttgagcccaggagttcgagatcagcctggacaacataaggagaccctgtctctaacaacaacaaaaaaacaatcattggccattggtgattgatttaatctccagccttccctccctgaagtgggagtgaaaggggcctggaagttctagccctcagggcttggtctttctgggaaccagcctcatcctgaagctctatcctaggccaacccctctctccccaagggttgcccccttagcgtaaacttcagtatggttgaaagtggctctttctgaataactaatgtccctcgtatcactgaggaaattccaggccttttaggatttctgtgccaagaactagcagcaaagaccaaatatgtatttttattatgctccacgagttattctttgttcaacaaagatttgttcagcacttgcagtatattgaatattgtgttagatatgaggaacttcaacaaaggtttattgtaatctgtcatgtcaacaaaatagacaaaaatacctgcccatatagagcttatattcttgaggaagaatacagacaataaaaacagaaatctttgtatgtcaggcagtggtaagcaccatgggtaaagcggactttggagggtttgtttgtttttgctttttggcccctgccttattgccaacacctggagcaggacaaggtctatattgggcatccaataaatgagttaaatgtgttgaatgaataatgagaacatggtttcagcagaacttagtaaccagttgcgtggtggtgtgaggagagatgtctagaatgatgaccaggttgatcagagtaacctgggcagagagaatgctgtaggagatggggtttgaggaaatctgctgaatgggattttgaacacctctaagtaccagagaggcacccaagtagagaagtgtccagtgggaaatgcaggctgatgctcaggagggactcgtgggctggaggttgatgttgggagttatgggtatgtaaatggcgggcgaagcttagccatggtgagtcagtgcagggttgtcttctctggtaagtgcttgtttagtgtctgcctgtagactacctgggaagaaactcactttctgtaggcaacctgcttttttgaaaaaaataatttcaaattgataagaaattgcgaaaataggccaggcacagtgctcacgcctataattctagcactttggggagctgaggtgggcagatcgcttgagttcaggagtttgagaccagcctgggcaacatggcaaaaccccatctctacaaaaaaagtacaaaaaaattagccaggtgtagtggcgtatgcctgtcgtcccagctacttgggaggctgaagtgggaggttgcagtgaatccagatcacaccactgcactccagcctgggccacagagcaagattctgtctcaaaaaaaccaaaaaaccaaaacaaaaaaagaaattgcaaaaataaaaatagtacaatgaacatctgaatatcctttaacaggattcatctattgttaacgctctaccttagtaacttttttttttttttttttttaaggacagagtcttgctctgttgcccaggctggggtgcagtggctcgatcttggctcactgcaaccttcgctgctgggattcaagcaattcttctgcctcagcctcccaagtagctgggactacaggcaaccgctaccacgcctggctaatttttgtatttttagtagagatggggtttcaccatgttggccaggctggtctcaatctcctgacctcttgatccacccacctcggcctcccaaagtgctggaattacaggcatgagccactgcacctggccctcctgtcagtatttttgagctttgttcttagatgtagttcatttaattgaaaacagcataccttttaagatttgttgggcaggactggagcattactcagtctagggctaattatttcctgcttctaagggaagacccttctgtgtgctccacccagttcctgtgaatcataagcttttaagtggctggtgggaccagacactatacccagctgagggcggggccctaataccactaatcctcttggctggttctttcccagacttctgctaatttgctcactttatgtactgatcagtcctcagctgaagactcagggggactgtctgcagctctctggaattgtttttctgtgtagctttcctttctgataccgttgtctgtgaactctggtcaccctgatatccctagagtcacatccccgtctcttcaatccatgggggctgctggcctccgcctgggttctttctccctctgctgcctactcttgagaggaactgccagatattttccagagtggctgtaccagcaatgtgtgagtgattccgtttttctgaatccttgccagcacttggtgttatcactgtttttgatgttagcgattgtgatagatgtgtagtcatgtttcattgtggttttactttgtctttaatgggtaatgatgttgagcatcttttcatgtgtgtatttaccctctttatatcttctttggtgacgtgtatgtgcatatcttttgcccattttctaggcagggtttttttgttttgttttgtttttactgttaaccttcactttttaaattttttttttccagacggagtctcgctcagttgccaggcggagtgcagtggcgcaatcttggctcattgcaacctccacctcctgggttcaagcgattctcctgcttcagcctcctgagtagctgggactacaggcgcacgccaccacgcccagctaatttttgtatttttagtagagacagggtttcaccat[136 bp omitted]gacagagtcttgctctgtcacccgtgctggagtgcaatgacatgatcttggttcactgcaacatctgccccctgggttcaagtgattctcctgcctctgcctcttaagtagctgggactacaggcatgtgccaccacacctggctaatttttgtatttttactagagacagggtttcaccatgttggccaggctggtctcgaactcctgacctcgggtgatctgcccgccttggcctcccaaagggctgggattacaggtgtaagccactgtacctggcccactttttaaaaaatatatatacaattttttctttctttttttaaaaaagacagcgtcttgctatgttgctgaggctggtttggaactcctggcctcaagcaattctcccaccttggcctcccaaagtgctgggattacaggcatgagaccctgcacccagccatccttcacttttgatatataggtttgctggtatcgatttctggggtagaaatcacttaaaaattataaaggtcttcttcctttcagttacagagttctcctcttctcactcttgaggattctcctctcagcttttgagatatcctagctgttctggctgctgactcttcctaggcctctctgactccccttcggagctcacacataattctcagaatccatagtgactgcctttcagtgtgataccttggcttgtttggctatgattgcaacaaaaacgtggtcataatgacaagttgtgtccttattttatttctgttataagctacaggtcaaaggggatagcttgtggggtacaataattcacagagaagaaatacaagaatgttcctggatagaaatgcaagtcattttgataccttacttttttgttctaatagttgatgcttggtcatcattatcattgtctgcaagtgctgaggtgttgggttttttgaagaaatttaacaagtgagaatgtttattccttggctccttggtggtaactcaggcctgggtatgtgatgtttcggcaacattagtgacgtttctgccatcttgacttataggtggaagcctcttcggcctgctgagcaagaacaatcgttttggtagaaatccagttgtgctgttgggcatcctggtgcacttcatagctttttatctaatatttctcaacatgcctggagatgccccgattgctcctgttaaaggaactgacagcagtgcttacatcaaatccaggtatagtggctgtcatttctctagtcgcttgagtacgggtgggaggtaacggatggctagatactgaaagtggagcagttaatcctcttcagagagcctggtgtctctctaaggtcatctgtcaagtgttcatggagtcagactgagtttaaataggaatccttagagaatcctaagttatttttgtaatagttggttttaaccttttcccccactaaatctttttcttgatccttgaaggagcacgtaagtatctgatttgaattttttatctctgcttcttaagcagtgaaatatccagacattagggcctggaggaagaacaaagaggagcgagggagaacctggcaaccggggaggccattcagtccttccagagcagtttatataacgtttgaggatatcggtttagtgcactcaactctcaagttcattataaacgcagacatttatgtccagctccacaaatccaaggggagcccagcccaaaaaactatacaaactgagtatatcgcatctgaaaatctgaaacttttcaagggccaacatgatgctcaaagggaagtgttattagaacatttcaggttacagattttcagattaaaaatacctaactggtcagtgtaatgcagatgttccaaaatctgaaaagaaaatttgaaacacttctggtcttgataagggatactcaacctgcattttcttcacaaatggttgagaccagagtttgttagaatgtaaaggtgtgtgcatttgagcaaaaattcttactttgtaaattctagtctttatgttttatttttatttatttatttatttattttgagacagagtctcactctgtctgccagcctagaatgcaagtggcgtgatctccgctcactgcaacctccacctccggggttcaagtgattctcgtgtctcagcctcccgagtagctgggattacaggcacgcgccactatgcccagctaatttttatatttttagtagagatggggttttgccatgttggccaggctggtctcaaactcctgtcttcaagtgatctgcccacctcagcctcccaaagtgctgggattccaggtgtgagccaccgcaccagctttgtctttatttttgtttcatagtgtttacaacttgcaggtagaattcttttgtgggtgggttgcttgtatattttaaatggctctagcagatattgctcatactaaattgatttttattttcttcagcaaagaagttgccattctctgcagttttctgttgggccttggagacagctgctttaatacccagctgcttagtatcttgggctttctgtattctgaagacagcgccccagcatttgccatcttcaagtttgttcaggtaacctcttcagattgtgattgtgtttgacatagggctcttccctttgtgtattgccttgttttccttggttacttgtattgtggttttaatttttatttatttatttttatttttttgatagagtctctctctgtcactcaggctggagtgcagtagcgcaatcttgactcgctgcaacctccgcctcccgggttcaagcaattctcctgccttagcctcctgagtagctgagattacaggtgcacaccaccatgcctggctaatttttgtattttttttttctttttagcagaggcagggtttcaccacgttggttaggctggtctcaaacttctgacctcaggtgatccacctgccttggcctcccaaagtgctggggattatatgcgtgagccaccgcacctggtctatttttttattttatttttttttaaagacaaagtcggcccgccgcggctcacacttgtaatcccagcactttgggaggccaaggtgggcggatcacgaggtcacaagatggagaccatcctggctaacacggtgaaaccctgtctctactaaaaatacaaaaaaattagccgggcgtggtggcacgtgcctgtagtcccagctacttgggtggctgaggcaggagaatggtgtgaacccgggaggcggagcttgcggtgagcccagaccgcgccactgcacttcagcctgggccacagagcgagactccgtctcaaaaaaaaaaaaaaaaaaaagacagtctcactctgtagtccagactggagtgcagtggcacgatcttggctcagtgcaatctctgcctcccaagtaggtgggattacaggagtgcactaccatgttcagctaagtttttatatttttagtagagatgaggttttgccattttggccaggctggtcacaaactactggcctcaagtgatccgcccgcttgggccccacaaagtgctgggattataaacatgagccaccgccccggctatattgtgtttcttattttattttatttttttgtttcctctttttttttcctttttttgcttttgtcttgtattgtgttttttaaatgaaagttggggacatcctttaagaggatttatgactagaattaggaagcaatgagcagtaagattttttgtgtaacagattttatgttctggtctctatggctctgattagagatttccttccttagataccagaattctattcatttgtaatacagacaagtgtatttcttactctgtacattcttgttactccagttttccacaaaatgctatttttgtttcattttattttattttgtagagatggggtcttgctatgttgtgcaggctggtcttgaactcctgggctcaagcatttctcccaccttggcctcccaaagtgttgggtggcatgaacccccacacctggccaaaatgctattttaaataccaggaactgtggcaggagtttatggtgcatgtttgtgagtcagtgactgaggaagtcataccttgatgcagaaagaatagaaagcactgtgagttccaggtgtccttggggcaggataggagtggggctaggggctaactgtggctcagtgtggcccccggtgcgcccgttgtgatttgttttgtttgttcttagtctatttgcgcagccgtggcatttttctacagcaactaccttctccttcactggcaactcctggtcatggtgatatttgggttttttggaacaatttctttcttcactgtggaatgggaagctgccgcctttgtagcccgcggctctgactaccgaagtatctgatctggtgtccgtgaggggacacgtatgacctcagaaacacagctggacacagagcttggtggaagaagtcgcctttgatcttcactatatattgggtgatgttcagtatggaaaatcaagggattaagactgttaaatcagccagagttggtgttcaagtttacagatatgagttatttaaagcaagtagaataagggaaagctgttctgtcaactgtaattgttcaaagatgttgtttttcatttcatctatctcaattcttataatcatgttatagaatgtaaatgttttcttctctctcctgctcttgttggaagatcctgccttgatttagaatactaggccatatgtcatataaatattttttctggatatggagtatgttttgccatgtaataatgggaagcatatgtcattccccatatgtgttggagaatgacatttaaataaatagcaaagctgggtgtggtgttgcaccgctatactcccagctgttggggaggctgagacagaaggatcacttcagcccaggagattgaggctgcggtgagctatgatcacaccactgcactccaggctgggcaacagagtgagaccctgtcttgaaaataataataggctggtcacagtggctcatgcctgtaatcccaacactttgggaggctgaggtgggtggatcacctgaggtcaggagtttgagaccagcctggccaacatggtgaaacctcatctctactaaaaatacaaaaatgtgttgggtttggtggtgcatgcctgtaatcctagctactagggaggctgaggtaagagaattcgcttgaacctgggaggcggaggttgcagtgagccgagatcgtgccattgcactccagcctggatgacaagagtgaaactccatctcaaaaaaaaaaaaaaaaaaaagaaaagaaaataataatgataattttttaaaataatgaaaaataaataacaagatgctgaaatgaaatattgattttgaaaagatgtcttcctctgtaaatgtttcatttgataagttttcttaccttgtagctcatagcaaggagtggccagttaagtattatgaaataaggtaaaaattgtcataagtcttttttaaaatttatttattatttatttatttatttagagacggagtctcactctgtcgcctaggctagagtgcagtggcgtgatctcagctcactgcaacctctgcctcccgggttcaagcaattctcattctttagcctcccaactagctaggattacaggcatgtgccaccacacctggctaatttttgtatttttagtagagatggggtttcaccatgttggccaggctggtctggaactcctgacctcaggtgattcacctgcctcggcctcccaaagtgctgggattgcaggggtgagccaccatgcccggtcctttaagtcttaagaacagggatctaacatctgtaacaacaaaaacattgaaaaagacaaacatatttactgagggaggacttttgctagcaattttcctggaagatgcaatgcagaaacccccaaacaaacctggaatgagatctgagctgcgtcatcaggccagtgtcacaccgtcatttatgtgtcctcctcgagcagtgcaagtctatcatcctgggtgcgggaatggaacataactatttggggagatgttaaatggaagtgttagcttccctccataagagctcacttaaattttttttttaaattgaaatcaaatccagaaaccataaaaatgtcccattttaaagtgtacattcacaaggttgcataaccaccacaatgatctaattccaggacattttatcaccccaaaaagtagtcgctgcctgtcagcagtcattctttctcatctggcatggcaaccacgaatctactttctgtctctatagatttgcttattttgaacatttcatgtaaatgagacagctcagttttgttttttttttcttttcaaatttttagtagagacagagtctccctatgttgctcaggctggtcttgaactcctgggcttaagtgatcttcttgccatggcctcgcaaagtgctggggggattacaaacaagagccaccgtgcctaggaagagctcacttttgttgttgttgtcttttggttgttgtgtatgtgtttttttttttttttcaagacagcgtctcactctgttgcccaggctagagtgcagtggcgcaatcttggctcactgcaacctccgcctcccaggttaaagcgattctcctgcctcagcctcctgagtagctgggattacaggcatgcaccaccccgcctggctaatttttgtattttcagtagagacggggtttcacca[136 bp omitted]gatataacctccattggcttagttgatcctatataaataatttacaaatgcccttttagacttaacagtagtgatttattatctctttaagcacattatttatcaaggtgtattagttttctaatgtgccataacaaattacctcaaaacgtagccacttaaaataacacacatctatttcatcacagtttctgtgggtcgggaatctgcgcatggctgagctgagtcctgagcgtctctccaggctgcagtccatgtctctgcaggctgcagtgaaggtgtgttccaggcttcactgggggagggcctgcttccctgctcactcgtatagttgttgcaggagtcagttcctcacagactgtcaggctaagtaaggatcttggtttcttatggctattggctaaagatcgccctctgcccttcatcatgctacggagtagtcctcagggcagcctacgacatggcagctgtctccatcaaaggtcacaagcaaggacagctggagagaacgagagcaagacaaaagccgcagtctctcataacttcatcactgttgcactctgtctgttaggtgccagtcactagttccagcctattctcagggagggaattggtggggagcatcttacaaggctgcccaccttgtcacctgtcacactgagacttacatggaaggtgacaactgggtcctgtattcccaagcctcgcattctccaggcccttgctctgtttgctcataatggatctgtacaaccctgctggcagaaggaggtgaagccacctctgttaatgacactgagaattttaatctgaggaagccatggcatcttgtcacccctaggattcctggtgattattgtcaaaagggaaaggaaatgaagtgaagtgctgtgtgcagtatggcaggaacccagcttttcctaggctgcctcctactggctttgtgctatggtattcattttcagtttcgtactcacttttttgttagagacagggtcttgctttgttgcccaggctggatcacagtggcacagtcatggctcactgcagctttgacgtcttgggctcaagcaatattccggcctcagtctcccaagtagctaggaccacaggcatgtaccaccatgcctggataattttttttttttttttgtaaaggcagtgtcttatcttgcccaggctagccttgaactcctggactccagtgatcctcctgcctcggccttccaaaatgctgggattacaggaatgagctactatgcttttttttctcccccgcccccggcccctgtggggagtttgttgcgcttttattcagttcttttttatttttattttttgagatggaatttcactcttgttgcccaggctggagtgcaatggcgcgatctcggctcactgcaacctctgcctcctgggttcaagcgattctcctgcctcagcttcccaagtagctgggattacaggcatgtgccaccatgcccagctaattttgtatttataatagagacagggtttcctcatg[181 bp omitted]acctccacatcccgggttcaagcagttctcctgcctcagcctcccgagtagctgggactacaggtgcacaccaccatgcccggctaatttttgtattttttagtagagatggggcttcaccatgttggccaggctggtctcgaactcttgacctcatgatccacccacctcagcttcccaaagtgccgggattacaggcttgagcccaccacgcggggctgcttttattcagttcttgtgtctatagttttgatcttggttgactctttagatgactggataacattaaggtcatcttttaaattctttgcattacttgagttaaagatgaaatgtggggccaggcacggtggctcacgcctataatcatagcactttgggaggccaaggcaggcagatcacaaggtcaagagttcgagaccagcctggccaatatggtgaaaccccatctctactaagaatacaaaaattagccaagtgtggtggcaggagcctgtaatcccagctactcaggaagttgaggcaggagaattgcttgaacccgggaggcagaggttgcagtgagccaagatcacgccactgcactccagctccaaaaaaaaaaaaaaagaaatgtgacaatgaaataaatagtttaatttttatgcttgtcttatatatgctgttcaaaacttttgtcttcatacttgtagctaagtaaatgctgtagctgggtctcccatgggtgtttgtttgtgtgtgtggatgtcccgctcttttattgcaagtttcatattgtctatatttagatttggcttagaccttgagcaacgtttattgaaccacaggtgtttttctctgtgagtatgaaaacattctcccctcccctcccgagttttcccataccccaacttgaacgcctttaaaccagggcttcggctgcccacacaggatttctttcctctaggagtttttgttggttggttggtttgttgtttgttgacttatagtaagtcccttgggggtcttttgttttttgagacggagttttgctcttgatgcccaggctggagtgcaatggcacagtcttggctcactgcaacctctgcctcccaggtacaagcggttctcctgcctcagcctcccgagtagctgggattacagatgcctgccaccacgcccagcctatttattttttgtatttttagtagagacgggatttcaccatgttggccagactggtctcgaactcctgagctcaggtgatctgcctgccttggcctcccaaaatgctgggattacaggcatgagcccccactcctgacccccttgggagtttttaagttctccaagtacaaataagtccccattaatagtcattttttttggatcttcacacccattgggatggctgctacccagaaaaaaaaaaaaagaaaaaaggaaggtgttggcaaggatgtggagaaattgaaacccttgtgcactgtgtgtggaaatgtacaatggtgaagctgctgggaaaacagtatggcagttcctcaaaaactagaaataccatgtgatccaataatttcacttgtgggtatatacataaaagagttaaaagcagacttgaagcaatatttgtacacccatattcatagctgcattattcacaatagccaaaaagtcaaaacaactcaagttattcatccatagaagaatggataaacaggccaggcacagtggctcaagcctgtaatcccagcactttgggaggctgaggcaggcagatcatgaggtcaagagatcgagaccatcctggccaacacagtgaaaccccatctctactaaaagtacaaaaattagctgggcatggtggcgctgcctgtagtcccagctacttgggaggctgaggcaggagaatcgcttgaacctgggaggcagaggttgcagtgagctgagatcgtgccactgcactccagcctggcgacagagtgagactccatctcaaaaaaaaaagaatggataaacaaaatgtggtttctccatacgatggaatggcattcagcattaaaagacagttatcctcaggccgggtatggtggctcacacctgtaattccagcactttgggaggctgaggtgggtggatcacttgaggtcaggagttcgagaccagcctggctggccaacatggtataaccctgtctctactaaaaatacaaaaattagttgggtatggtggcatgtgcctgtaatcctagctaatcaggaggctaacgcaggataatcgctggaacccaggagacagaggttacatcaagcagagatcatactactgcactccagcctgggcaacagagtgagactccgtctcaaaaacaaaacaaaacaaaaaaacttattctcaacaaactaaaaatagaattacatatgatccagtaatttcactctgggcatatacacaaaatagttgaaaaggtctcagagatatttgttcacccacattcactgcagcattattcacaattacctaacagtgggaaaataaatcttcatcagtgaatggaacaaaatgtacgtctatacaatgaagtatgattcagcctttaaaggaaggaaatttgggcacatgctacaacatagatggacctggaggacattatcgtgctgagtgagataagccagtcacacaaagacaaatactgcttgatttcatttattatatgaagtacctagagtagacaaattcatggagtcagatgtagaatggtgggctggtggggacggaagagtgggaaggtagtgtttattgtcttcattttttatttttgaggcagggtcttgctctgtcacccaggctggagtgcagtggcacaaacatagctcactgcaacctccaactcctggcctcaagcggtcctcccacctcagccttccgagtagcttgggaccacaagcgcatcccaccacactcaggtaatttttttgtattttttgtaaagacagggtttcaccatgctgccaggctggtcctgaacacctagactcaagcggtccacccacctcagcctcccaaagtgctgggattacagacatgagccactgtgcctggcctagtatttaatgagtacaaagtttctgttgtgcaagatgagttctggagatgggcagtggtgatggttgcacagcattataatgtatttaataccactgaactgcacacttcaaaatggttaagatggtaaattttatgagtatttttatcacaattaatggctaggcatggtggctcatgcctaaaatcccagcgctttgggaggccaaggcaggtggatcacctgaggtcaggagtttgagaccagcctggccaacgtgctgaaatcttgtttcttaaaaatacaaaaattagctgggcatggtggtgggcacctgtaatcctacttgggaggctgaggcacgagcatcacttgaaccaggaaggcagaggttgcagtgagccgagatcgagccaccgcactccagcataggcaacagagcaagactccatctcaaaaaaaaaaaaaaaaaacagaggtgttccttgagtacctgagacacaagcactcctggagctcttctaattttttttttttttttttgagacggagtgttgctctgtcacccaggctggagtgtagtggtgtgatctcggctcactgcaacctctgcctcctgggttcaaacgattctcctgcctcagcctcccaagtagctgggattacagacatgcaccaccatgccctgctaatttttgtatttttagtagagacag[136 bp omitted]aggactcacaggactcagcacgtgttgaactcaacagtgacgcagtcagaatgcgcagctgggtcttaaggaaaaggactcagcagagcatacaggaatccagacacaggcttcctatgctctctccagcccgaggagtcacacagaacacactcttaccccagcaacaaagatgcagaaacacaggcatgtgccatatttctgtccaggaaagcccactagagacacagcaccaaaggtttttactgaagtctggtcacataggcagcctctgcccagctggtaccaaaattccgtactccagaaggaaagcaggtgtttatttagcattagccacaatgtttcttgtttttttgttttttgacacggagtctcgctctgtcacccaggctggagtgcagtggcgcgatattggctcactgcagcctctgcctcccaggttcaagcaattctcccacctcagcctccggagtagctgggatttacaggcccaccaccatgcccggctaatttttgcatttttaatagagatggggtttcatgcaggctttgtatcaatacaacaaaaatgttctcaagggttctcatgtctctcgaacctctatttctaggcatgactctcagaaacagatatcaaaggataacaggatgtgagtgatttctttttttttttttttttttgagacagagtttcgctcttgtcgcccaggctggagtgcggtggtgtgatctcgactcaccgcaacctccgcctcctgggttcaagcgattttcctgcctc[131 bp omitted]accttggcctcccaaagtgctgggattacaggcatgagccaccgcacccgaccagatgtgagtgatttcagtagaacacggacatccttccttattttctcaaactgagagattcattatgtaattgaaagaaaatattctttgcaatatggcctaagtgtctagttctgttacttttggtcctccaagaaaatgaaaggcttgatcaagctggatcaaattccagccatatggttgggtaaatataatactatgagcttttgttatataatcagcagtgaaatgattgaaaaccaaaaataaaaccctaaccccccaaccccaaactgactgaacagaccccttaatgggccaagaggatgctagagaaacctcaaaacaattcccagccatgaccggggaaaaaaggtcagctgccttattatacccacctttttcggagtttaggcacaactgaccagcatgaacattaaaatagcaatcataaaactgacagaacagactctgtagcaataagataccaaattccaacctaactctggcatagcatcacatgacagataggagacctgagggaaatacaaatattttacccccaaatacatggttttgctttttttgttgtttgtttgtttgtggttttttttttgagacagagtctcactctgtcaccctgggtggagtgaagtggcctgtcaccaggctggaatgcagtggcatgatctcagctcactgcaagctccgcctcctgggttcaagagattctcatgcctcagcctcctgtgtagctggatttacagttgcacgctgccacacctggctaattttttgtatttttagtagagacagggtgttgccatgttgtccaggctggtttcaaactcctgagctcaggcaatccaaccacctcagcctcccaacatgctaggattacaggtgtgagacaccatgcccagcccaaaatatatatgtatatattttgttgttttgttgttgttttgagacagagtctcgctgtgttatccaagctggagtgcaatggcatgatcttggctcactgcaaccaccgcctaccaagttcaagcaattctcctgcctc[132 bp omitted]gccgaggcaggtggatcatgaggtcaggagttcgagaccagcctggccaacatggcaaaaccccatctctactaaaaacaagaaaaaaattagccaggcttggtggcacgcgcctgtagtcccagttacttgggaggctgaggcaggagaatcacttgaacctgggagaaggattgcaccactgctctccagcctgggcgacaggacgagactccgtctcaatcaataaatcaatcaataaataagatcggacgtggtggctcatgcctgtaagcccagcactttgggaggctgaggcgggcgcatcacctgaggtcagaagttcgagaccagcctggccaacatggtgaaaccccatctctactaaaaatataaaaattagctgggcatagtaatgcacacctgtaatcccagctactggggaggctgaggcaggagaatcgcttgaacccagggggcggaggttgcagtgagctgagatcacaccattgcactccagcctgggtgacagagtgagacttcatctcaaaaaaataaaaaataaaaaagttttagagcaggaatgaaaggaagcaaagtacacttggaagagggtcaagtgggcaacataagagatccaagtgccctgttcagccttgggcttggggttttatacattggcatggttccggggtttgtgtttttcttcccttaattttccccttggggcaggctgtctgcatgcacagtgacctgccagcacttgggaggggccgcatgtgcagtgcgtttactgaagttgtgtgtatgctcgtttgaggcatttttctcttaccagtcaagcattcccagaggaaggtcatataccagttaaactcccattttgcctcttagtgcacatgtttgaaccgactcgcctagctcctgagatcttatcaggaagctgctgatcactagctccaggtattttctatctactgggagactgcaggtccctggaaccagctgcaaccaattatcattttagcgacacagtttaacaactgcctgaccatcacctgatggttgcctgacgacctgataggggccctctcctgccctgctcagttctgcctaactgcctactctaacatactgatttatgtcttggcctgcaacttctgtctccctaaatgtgtaaaaccaagctgtaactgaccacactttctcaggacctcttgggattgttctcccagccatggtcactcatattggctcagaataaacctctttaaatatcttgcagagtttggttttgttcatcaacatggttgtgaatatggattgtgtttattggttaagagataattaactttgaaaagttaatgtctcattaaaataaaacataattactttggcttgtttgtttgggttattttggttgggtttccagcatgtaaaataattagacaactcttttctctacaactcacatttcttttcttttttttttttttctttttttttgagacagagtctcactctgttgcccaggctagagtgcagtggcgtgatcttggctcactgcaacctctgcctcctgggttcaagtgatcctcctggctcagcctcttgacgcatgagccaccacgcccagctaatttttgtatttttagtagagacagggtttcaccatgttggccagtctggtctcaaattcctgacctcaggcatgagccaccatgctcggcctcggcctcatatttctttctttcttttttttttttgagacaccatctcactctgttgcccaggctggagggcagtggcgtgatcacaacttactgcaacctctgcctcctgggttcaagcaattctcgtgcctcagcctcccgagtagctggaattacaggtgcgcgccaccatacccaccacaggttttgccgtgttg[135 bp omitted]tagaaatagtctaactcggccgggcgtggtggctcacgcctataatcctagcactttgggatcacgaggtcaagaggtcgaaaccatcctggccaaaatggtgaaaccccatctctactaaaaatacaaaaattagccgggcgtggtggcacacaccttgtagtcccagctcctcgggaggctgaggcagtagaattccttgaacctaggaggtggaggttgcagtgagccaagatcacaccactgcactccagcctgggcgacagagccagactccatctcaaaaaaaaaaaaaagaaatattctaacttgacattttgtgtgttttgtgtgttttttggtccttgatcaacaatatactaaatcttaatactaggatgtatatttgtgtgaaggtagaaggtcaaacttgaccttctttttaactttgtgtgcaaatagtgtgaatgtgccctggacacctccctgcagcattgggctatgatttactggttttctgagctgctattaaatctggaagttttgatgttcttatcaagagtagttctgccctatttctgtgtgataatttagagaacaagcagattgcagctttagagaagtctagtccagaggaggctcctttgagcatttatttttgacttcgtttcaattcacaggtcctctttcttttacttcctgaaaatgttgtcagatatttccaattcttcagtcttttttgtttacattctaagcctgtttaacttttttttttaaattggtttagttttctcagttttatatcttagaaagggatcttttgggataattgtcactgaaccgaaagcaatttgatgactcatattgtagacactgtgagaacatgttgaggaaaaaacagatgttttcttctctacttctttgtggttggcgcgctggggaggtagcctgctgaatccatgtgccgtgggggagccgcacggggtgtctgggctggctctcctcccacaggtggctgccccccaagctgtaccctattctgcaggaaatgatttgtttggcagccagagcttgctttccactaaagaacattgccttggctctggcaaaccctttgacttaggaaccattttggcctgtcccattattttgcagaatgaagcgctttgggtttgctatacagctggttttggttttttgcttgttttttttttttcttttttctttgtgttcccccccgccccgagagatcaactctttcattttatccctttctggatcagaaaccattgaaaccagtgaaagaagaatagcccagtgcagggcactcacgtctattcaacactgaatccttaatatgctagatgagcccagcacatttcatacagtgccatggtgccctccacggcctgaccttccaaagcgaattttctctgctagagacatcactaatatatattgagtgcttacctacataccaggcacccttttttttttttgagacagagtctcactatattgcccaggcaggagtgcagtggcactatcttggctcactgcaacctctgcctctagggttcaagcaattctcctgcctcagcctcttgagtagctgggattacaggtctgcatcaccacatccagctaatttttgtatttttagtagagagggggtttcactatgttgtccaggctggtctcgagctcctgacttcaagtgatccacccatctcagcctcccaaagtgttaggattacaggcatgagccactgcacccggtgtaggcgttcttttatttttcttttctttcttttttttttttccgggctctctttaaagcatgttacaagtaattatcaactagaaaccattatccccattttatagatgagaaaaccaaggcacagagagatcaagtaacatatccaagatggcagagcaggtaagtgcagataaggacccgcctaaatttgtccatgtcctgattgctggaacctgtgaatatgttagttccatggtaacggggaattgaggttgcaggtgcaattaaggctgctaatcagctcaccttgagatggggagattatctggaattagctgaatgggcccaatataatgtcaggtccttaaagtggaagattatcagggaacctgcccccaatagtcatgtaggttcttttctattttccctaagcatccgccgggttgagaaataaagggacagagtacaaaagagagaaattttaaagctgggcatctgggggagacatcacatgtcggtaggttccttgatgtcccacaagctgcaaaaccagcaagtttttattagtgattttcaaaggggagggagtgtatgaatagggtgtgggtcaaagagatcacatgcttcacaaggtaatagaatatcacaaggcaaatggaggcagggcgagatcacaggatgggcgaaattaaaattgctaatgaagtttcgggcacgcattgtcattgataacatcttatcaggagacagggtttgagagcagacaaccagtctgatcaaaaatttattaggcgggaatttcctcgtcctaataagcctgggagcactatgggagactggggcttatttcatccctacagtttcgaccatagaagatggccacacccaagggggccattttagaggcctaccctcagggccgcattctctttcagggctgttccttgctgagaaaaataattcagcaatatttctcccatttgcttttgaaaaaagagaaatatggctctgttccgcccggctcaccagcggtcagagtttaaggttatctgtcttgttccctgaacattgctgttatcctgttcttttttcaaggtgcccagatttcatattgttcaaacacacatgctctacaatttgtgcagttaacgcaatcatcacggggtcctgaggcgacatacatcctcctcagtttacgagatgacaggattgagattaaagtaaagacaggcataggaaatcacaagggtattgattggggaagtgataagtgtccatgaaatcttcacaatttatgttcagagattgcagtaaagacaggcataagaaattataaaagtgttaatttggggatctaataaatgtccatgaaatcttcacaatccgtgttcttctgccatggcttcagccggtccctccattcggggtccctgacttcccacaacagaagatggaggcaggagggtcagggtcagagtcaaagtgatgcattgggacaaagattcagtctgctgttgctggcattgaagacagtggaagggaccacaagccatagaatctaggtggccactaggaggtggaagaggcaaaggaacagtttctcccctagagcctccaggaacaatgcagcagccttgctgacaccttacttttagccccaggagacccgtcttgcacttctgacctccagaagtgtaagataataaaattgtgttgcctttaagccactcaatgtgataatttgctatagcagcagtagcaagctaatacaaggagagatggatttttaaaaatctcatctgggctgggtgtggtggctcacacctgtaatcccagcactttgggaggctgaggtgggtggattacctgaggtcaggagttcgagaccagcctggccaacatggtgaaaccccgtctctactaaaaaattagccgggcgtggtggagcgcacctgtaatcccagccactcagaagactgaggcaggagaattgcttgaacccaggaggtggaggttgcagtgagcctagatcacgccactgcactccagcctgggtgaaagagcgagactccgtctcaaagaaaaaaaaaaaattagccaggcgtggtggcaggcacctgtaatcccagctatttaggaggctgaggcaggagaatcacttgaacctggtaagcagaggttgcagtgagccaagatcatgccattgcacttcaaccttggcgacagagcaaaactctgtctcaaaaaaaaaaaaaaaaaaaatctgaagaagatgtactcttttttttttttttttttttttttttgttttgagatggagtgtcactctgtcactcaggctggagtgcagtggtgtgatctgggctcactgcaacttccacctcccaggttcaagcgattctcctgcctc[137 bp omitted]gccttcaaaagtgatgggattacaggcatgagccaccacacccagccgaaaatgtactcttaaccacagtcagtcctccataaccattttgtattgtaggttcaaacaaccatggatcgaaaatatggggaaaaaaattgtatctgtactgaacatgtgcagactttttttcttatgagtccctaaacaatggtgtataacaactatttacatagcatttacattgtattaggtattgtaagtaatctagaattgtagtaattacgggctcatgcctgtaatcccagcactttgggaggctgaggcgggcggatcacccaaggtcaggagttcgagaccagcctggccaacatggcgaaaacctgtttctaccaaaaaaaaaaaaaaaaaaaattagccagacgtggtggcgtgagcctgtaatcccaactacttgggaggctgagtcaggagaattgcttgaacctgggagatggaggttgcagtgagctgagattgcaccactgtactccagcctgggtgacagaacgagactccatctcccaaaaaaaaaaaattataaagtatgcaggaagatgtgtgtaggttatatgcaaatactatgctattttatatcaaggacttgagcatctgcaggttttggtatctgagggatgactgggatgactacacatctttcatgatgttgacaatcagtggaagatgagggatgttgtaattttgattaaatttctccattcagaaaatggtggtgctttctaatttcctaccagatcagctcactgcaagctccacctcccgggtttacaccattctcctgcttcagcctcctgagtagctgggactacaggtgcccgccaccacgcccggctaatt[138 bp omitted]ggccgatcaggcccatacttctttgcctgacactgaacaattcctaaaacctcatcctgcaaaaccatacctgctccatgcaaaaccaaaacttcaagactctaaaaccatgccagtctccaaaacatacccttttctgtagacacatttattttattcttgtttcatgaatacattttacttcaacatctctgcctttgttcatattgtatttctttgtggaatgacctctctttctccttccttctatccaaatcctattcatcttcaggacctggcataagtcccacctccctgtgaagccttttcggaccacagcagccttttcctgactttagtgaagttcccacagactgaatcacacctcatcttgcattgcttccttttcccccatgtgtttttcttgttctcacaactatattaactcttggggggaaggactgtcatttacagtctacatcgtacagtctacagtctaatatcctcgacattgactagtctgatgacttccaacaccaaatctctgggggtttctcttccacaccagccgactctgcagcaccagctgggtgttcaacaattcagttcaatcctgacactaccaggagttagcaccgaccctcacaggttaagtaaggtctcagtcccacaagactaccattaccagaaagggatcctgatgcagactccaagagagggttcttggatttcacacaagaaagaattccgaggctgggcacggtggctcatgcctgtaatcccagcactttggaggccgaagtggatctgaggtcaagagtttgagaccagcctggccaacatggtgaaaccccatctctactaaaaataccaaaaaaaaaaaaaaaaaaattagctggatatggtggcacgagcctgtagccccagctacttggaaagctgaggctcggttgggcacggtggctcatgcctgtaattgcagcactttgggaggccgaggcaggcagatcacgaggtcaggagttcgagaccagcctgaccaacatggtggaaactcatctctactaaaaatacaaaaaattagccagctgtggtggcaggcgcctgtagtcccaactacttgggaggctgaggcaggagaattgctggaacccaggaggtggaagttgcagtgagctgagatcgcaccactgtactccagcatgggcgacagagcgagactcttcctcaattaaaaaagaaaaaagaaaaaagaaaagaaagtaaagaaacaaaagaatggctactccatagacagagtagccctgaggactgttggtttattttaaggttgttttttgatcagttgctaagcaagggatggattttttaagagttttctggaaaaggagcgagcaagccccagaactgagggttcctccctttttaagcaatatagggatatagggtaacttctgggcattgccacggcatttgtaaactgtcacggctctagtgggagtgtctattagtatgctaatatgttatacttagcatataatgaggttgaggatgactaaagttccctttagtcgctgtgttggttttggtgggtttgggctggctctttttcttttacagcatcctgttgtatttattatcagggtctttatgacctgtatcttgtgataccagtcctgaggacctcctgtctcatcctgtgactaagaatgcctgacatcctgggaatgcggggcagcaggtctcagccccattttacccagcccctatttaagttggagttgccccagttcaaatgcctctgacactacccccacttacttcagatgccagtcctaaatccaggccgtccatacttcttactgaccagctgtaaagggaggggagttcctataatccccagctcatatttgataatttgctagaatggcttgcagaactcaggaaaacatttttttttttgaaacagggtctcactttgttgcccaggctggagtgcagtggtgctatcatagttcactgcagcctcaaactcctgggctcacgtgatcctcccacctcagcctcccgagtagctggaaccacaggtgcgcaccaccacgcccggttaatgttttaaataaatttatgtagagatggggtctcactatgttgctcaagctggtcttgaactcccacgctcaagcaatcctcccacctcagcctcccaaagtgctgggattacacgtcggagccaccatgcctggcccaggaaaacaatttacttaaaattgccagtttattgtagaggatacaactcaagaagagccaaatggaagagatgtgtaaggtgagcttggggtggggatgcaaagcctctatgccccgtccagggatgccaccctcccagcaccccatgtattcaccaacctcgaagctcatcacgtctccagatttgagagattttatgcagcttaatggcagcctcctccctgccctttcaggagatcagtgggtgggatgaaacgcccaaccttctaatcacttggtctttctggtgaccagtcatttgtgagactatatggggaccccaccctttgtcacctcagtacatgtgttatcagagaggctcataacaaccaaagacactcctgtctttcaggaaattccaaggcttgtaggagttctgtgccactgaggacaaagaccaaatatatttcttattatatcacatctagtaaaggtctgagcctcaaggtgactctcgggaagtggttagcaaccagtgagctgttgctctattatgatttagaaaataaggaaatgaggcagggcatggtggctcatgcctgtaatcccaacactttgggaggctgaggcaggaggatcacctgaggtcaggagttcgagaccagcctgaccaacgtggcaaagccccgtctctacgaaaaatacaaaattagccaggcatggtggcacatgcctgtaatcccagctactcgggaggctgaggcgggagaattgcttgaacccaggaggcggaggttgcagtgagccaagatcgcaccagtgtactccagcctaggcaacaagagtgaaactccatctcaaaaaaaaaaaaaaaaaaagaaaatatggaaatgcaatagattcagaatcataagatgtagacacagaaggaatcttggagaacatttaaaacttagggaactcttgagacaaaatctcactctgtcacccaggctggagtgcattgtcacgatcttggctcactgtaacccctgcctcccagttcaagcaactctcgtgcctcagcctcccaagtagctgggattataggtgcccaccacaatgcctggctaatttttgtagttttagtagagatgggctttcaccatgttggccaggctggtctcgaactcctgacctcaagtgatccacacacctcagcctcccaaagtgctgggattacaggtgtgagccaccacgtcctgccttattattatttttgagacacagtcttgctctgtcacgcaggctggagccatgtcagctcaatgcaacctctgcccccctggattcaagcagttctcctgccttggcctcctgagtagctgggattacaggtatgtgtcaccacgcccggctaattttttgtatttttagtagagactgggtttcctgacctcaagtgatccacccacctcggcctcccaaagtgctgcgattacaggcgtgagccactgcgctgggctcatggttcctaattatatcgcagaaccacacctctgtgtcccaaacattattgcaaagcatttctcttctcccaccttgttcccacccccaaccttgcccaaagcttaaagcttacaagtcacctaaatattctattaggggaaaaaaactccagcatgttttattatctgatcagatgcatcatctcataccccctttccccatgatttctcctgcatttcttcttgctattccagccactcctatagccttttcttctctttttttctttttctttttccttttttttttttttttttgagaccgagtctccctccgttgcccaggctgaagaactgtggtgtgatcttggctcactacaacctctgcctcctgggttcaagtgattttcctgcctcagcctccaaagtggctgggattacgggcacccgccaccactcccagctaatttttgtatttttagtagagacgggtttcaccatgttggccaggctggtctcgaactcctggtgtcaagtgatccacctgcctcggcctcccaaagtgatgggattacaagtgtgagccactgtgcctggcttagccttcggttttgctattttctctttttactaagtatctggctaaaagggttttcttggagctagtactgaagtggtatccttaagggaggtaaaaagtccaaaagctggcttaagtgtccagtaaggaatcacttaatttggcacagagggaagcattgcctctgtaatggtcacctatgaaatcctttccaattaaacagccttctcctttgtgctgtagtctctttgtattggtgtggccatttgtctgtgggtaatagccaactcgcaatggattgttgctgctattaatctttttttcaagaaagaaaatgacacacataataacctgtttgaaaaagccctttaatggtacattattatttgttgtctggctacagaacagtgagggcagtgcatagctgtctatacacttttcttgctgctacagaactgattgactgcagtaaaataaccttaagatgtgtttctatgtttcagtgtagagggtatacttagaatttcctgtatttatccttctattaataccatactcagactgggtgcagtggctcacacctgtattcctagcactttgggaggccaaggcaggcagatcacctgaggtcaggagttcaagaccagcctgggcaacatgatgaaaccccatttgtaccaaaaatataaaaatcagctgggcgcagcagcacgtgcctgtgatcccagctacttgggaggtggaggcaggagaatcgcttgaacctgagaggcagaggttgcagtgagccgagatggcacactgcacttcagcctgggcaacagagggagactcggtctgaaaaaaaaaaaaggaataaaagaatggctactccagccgggtgtggtgcctcacgtctgtaatcccagcacttcgggcggctgaggagagtggatcacttgaggcccggagttcgtgaccagcctggccaacatggcaaaactccgtctctacaaaaaacttaaaaaattagccaagcttggtagcatgcacctgtagttccagctttgagcccaggaggcagaggttgc[131 bp omitted]agagcagcatttttttttttttttttttgagaccaagtctcactctgtcacccaggctggagtgcaatggcatgatctcagctcactgcaacttccgcctcccaggttcaagcaattctcctacctcaggctcccgagtagctgggattacagtcatgcaccaccacgcctggctaattttgcatttttcgtagagacaggatttcaccatgttgaccaggctggtctcaaactcctgacctcagggatccacctgccttggcctcccaaagtgctgggattacaggtctgaaccaccgtgcctggcccagaggtcactttagttaccatcttgcttttggtgggtttggctggcttctttactgcattctgttttatcagcagggtctttaagacttgtatcttgtgataccagtcctgctgacctcctgtctcatcctgtgtctaagaatgcctgacctcctgggaatgcagcccattaggtcttggcctcattttacccaccccctattcaagatagagtcgctctggtttcagatgcctctgaggcaattactgggctgggcacggtggctcacacttagcactttgggaggccaaggtgagcggatcactttaggtcaggagttcaagaccagcctcgccaacttggtgaaagcccatctctactaaaatacaaaaaaaattagccaggtgtggtagtgggcacctgtaatcccagcttctcggaaggctaaagcaggagaatcgcttgaagccaggaggcagaagttgcagtgagtcccgattgtgccactgcactccagcctgagtgacagagcagaactctgtctcaaaaacaacaacaacaaaaacaattactgtcataaaaatgataataacaagtattgatgaagatttggagaaactggaaccctcacatatggctaacaagaatgtaaaatggtacatctattttggaaaacaatttggcagtttctcaaaatattacacataaaccgaccatacaactcagcaactctaactcttagaaatttactttcacaaagtcatgcacttgagtgttccgagcagcgttatttataatagtcaaaaactagaaacagttgacatgccatccacgtgtaaatgtataaaatgtggtttatccgtacagtggagggctgggcacatggctcacacttgtaatcccagcacttcgggaggccgaggcaggcaaatcacttaaggtcaggagttcaagaccagcctagccaacatggtgaaaccctctgtctactaaaaatacaaaaattagctgggcatggtggcatgcacctgtaatcccagctaccgcatgagtacactcagacaattgcaaaggagttccactcctctcaccttggggtcagcacctacccccattacacccatgatcagcaggaagaagttagagcagtcttcaccctttttccatattcattagccaacaccttaagattaaggtgttataaaacccaaagcgaggccaggagatcgagtccatcctggctaacacggtgaaaccccatctctactaaaaatacaaaaaattagccgggcgtggtggcaggcacctgtagtcccagctactcgagaggctgaggaaggggatggtgtgaacccgggaggcagaggttgcaaggaggtgagatcgtgccactgcactccagcctgggtgacagagtgagactccgtctcaaaaaaacaaaaacaaaaacaaaacaaacaaaaaaaaacccaaagcaagagattgaaagtgccatggcaaaattataactgagacagtgaaagagatctgacctaaccaactccatcttgctttgcatctccaagctgttcttattcattcctgggcacagaccgaactaactttggaaggaacttggtttatagtttaaaacaatgacgataacagccctttaccaaaacaaagttccttcttgcctggagactagactgcctttgtcggactaacaaattagccacaagattagaatttatggtttaggagtcatgcagctggaggatacaagattctgaccctccttaaactgctcctaagatcagtgtttgagatgttttgcagaccctgcactcgatggatcatctggcaccacccagatcgataaaatggcccatctgatcttatggcccctgacctgggaattgactccagcacaaaaggacagcttcagttctgcatgatttcatctctgacccaacagtcagcactcttgactcaatggccttccctcccacccccaccaaattatcctgaattaaaaactgtgatcccagaatgctcagggagactgatttgagtaataataaaactttggtttcccacacagccggctctgcctgaattacactgtctgtattgcaaattcccctgtcttgataaattggctctgtctaggccgtgggcaaggtgagcccgttggtcagttacaaccatgctcagctaattttttgtattttttgtagagatggggttttgctgtgtagcccaggctggtcttgaactctgggcttaagggatccccccatctcagcctcccaaagtcctgggattacagatgtgagctaccatgccccgcctaactgagtagctttacttatttatttaaaaaaattagttttattttttatatcgtaagccttacttgcaaaatgagtagctttcaatagatgatctttctctctttttttttttttgagatgcagtcttgctctgtcaaccaggttggagtgcagcggcgcaatcttggctcactgcaacctctgcctcccgggttcaagtgattctcctgcctcagcctcccaagcagctggtattacaggtgcccgccaccacgcccagctaatttttgtatttttaggagagacagagtttcaccatctcggacagactggtcttgaactcctgacctcgtgatccacctgccttggcctcccaaagtgctgggaaatgacaggtatgagccactgcgcctggccagtgatctcttcttactgcactctgtgacttgccttgaattccttcctgcacaagatccaggaaccctcccttagggtctgggtagggacccctttttctggcaacagagactttaaatacttttatgactgcctctgatagattgttctacacatctgtcctttttgttaacatgattataggaaatgtaatttagggcaccaagagaagatctattcacggaacacaggagtgaatacacactgcctctgtattgatggaactcatgctgggccattaagtatttatccatgtatgcaaatgagcattgttttcaagatattgagcctctcctacctttccttctaactgatccaaatcagaataacctgattggtgagctgagcttcacctctaacttgacttgttgttgtgctgctattggtaatgaggtgatactaagggactttttatgttgatagtgtgagcgtctcacatgcatgggataggtagggtatgtgggccctgggttttgactaggtgagatgcgaggaaatacttttttctctttttttttttttttttttgagatagagtttcgttcttgttgcccaggctggagtgcaatggtgcgatctcagctcactgcagcttccacttcctgggtttaagcgattctcctgcctcagcctcctgagtagctgagattacaggcacctgccaccactcccggctaattttttgtatttttagtagaaacagggtttcaccattttggacaggctggtctcaaactcctggcctctggtgatctgcctgccttggcctcgcaaagtgctgggattacaggcatgagccactgtgcctggccttttttttttttttcaccattttttgagacggggtttcactctggcccagggtggagtgcagtgggactacaggcatatgccaccatgcccggctaaattttgtattttttagtagagatggggtttcaccatgttagctaggctgatctcgaacttctgacctcatgcgactcaccagcctcggcctctcaaagtgctgggattacaggcatgagccaccacgccttgccagatatgaggaaatactacccactttggcagagtgctttatccttgctaaaataccttaccccaaatgcaagaaacaaatcttattcctgtttgttttttgagacggagtttgctcttgttgcccagactggagtgcaactgcgtgatctcagctcaccgcaacctctgcctcctggtttcaaaccattctcccacctcagcctcccgagtagctgggattacaggcatgctccagcatgcctggctaattttatatttttagtagagacggggtttctccatgttggtcaggctggtctcgaactcccgacatcaggtgatccgcctgccttggcctcccaaagtgctgagattacaggtgtgagccaccacgcccggcccttattcctgttattatgtgcagatattgagaggtgacagcgtgctgggagccctctcagccctcgctcgctcttggagcctccttggcctcgctgcccactctggccacgcttgaggagcccttcagcccaccgctgcactgtgggagcccctttctgggctggccaaggctgaagccagctccctcagcttgcgggaggtgtggcgggggaggtatggagggggatgcgcaggcggaaccggggctgcgcgtggtgcttgcgggccagggcaagttccgggtgggtgtgggcacgggcggccccgcactcggagctgcccgccagccccccggccccgccgccccgccggcacgggcagtgagaggcttagcacctgggccagcagctgctgtgctcaatttctcgcccggccttagctgcctccctgcggggcagggctccggacctgcagcctgctatgtctgagcctccccgcccccgccgtgggctcctgccctgcccgagcctccccaatgagcgccgccacctgctccagggcacccagtcccatcgaccacccaagggctgaggagtgcaggcgcatggcgcgggactggcaggcagctccacttgcggcccagtgtgggatccactgggtgaagccagctgggctcctgagtctggtggggacttggagaatctttatgtctagctaatggattgtaaacacaccaatcagcactctgtatctagctcaaggtttgtaaactcaccaatcagcaccttgtgtctagtttagggttggtgaatgcaccagttggcgctctgtatctagttaatctggtggggacttggagaatctttatgtctagctaagggtttgtgaatgcaccaattggcactctgtatctagctcaaggtttgtaaatgcaccaatcagcactctgtgtctagctcagggtttgtaaatacaccaatcgacactctgtatctagctaatctagtggggacctggagaacttttgtgtctagctcagggattgtaaacgcaccaatcagcactctgtcaaaatggaccaatcagctgtctgtaaaacagaccaatcggctctctgtaaaatggaccaatcagtaggatgtgggtggggccaaataagagaataaaagcaggctgcccgatgctgcagtggcaaccacctcaagtcttttggaagctgtgttcttttgctgtttgtggtattgctgctgtctgctctttgggtccatactgcttttatgagttatagtaccacaaaggtttgcagcttcactcctgaagtcagggagagctggaacccacaggggggaacgaacaactctagaagtgctgccttaagagctgtaactctcaccgcaaaggcctgcagcttcactactgagctagtgagaccacgaacccaccagaatgaaaaaactctgaacacgtctgaatatcagaaggaacaaactctggacacgctgcctttaagaactgtaacgctcatcgcgggggtctgtggcttcattctcgtagtcagtgagatgaagaacccactaattccggacacaatatgatacggaggtggttaaattacgtggcccaatcaagggtgggtcagccgaactgcagtgaggacttgggtcagcttggtgaagttcacgtttgggctttatcctctccctggaattttgtgtctcccaggcaatttctgttgcctgtgcttttgagtgaaaggtaagtctcctcccacagccttgctctgtagaataagatggcatttgtagaatctgacttttcagagtcctttcaagtatatccttactttgagcctcccagttaggagatggattcgtatcctcatgtgatggctcaggaacggagctcagagaggtggggaacctgcctgagagaacaggtgcgtggcacagtcagctccagaatgggcttccttgccctgcacttgtgttcagttgcctctccacagagccttttcccaggtgtttactaaatacagtcggacgaactagaatttcagaagttgaattaagcatacgacactgtaaactaaaaaccctaagcccctcaccaaacgagaacacccccagttgaccaagaggaccctagataaacatttaaaattgagttcctggccacgcgtgatggctcacaactgtaatcccagcactttgggaggtcgaggcgggcagatcacttgaggtcatcagtttgagaccagcctggtcaacatggtgaaaccccatctttactaaaaatacaacaattagctgggcatggtggcaggtacctataatcccagccactcagaaggctgaggcaggagaatcgcttgaacctgggaggtggaggctgtagtgagccgagatgccaccactgcattccagcctgggcgacagaccgagagtgtctcaaataaataaaatggagttcctggctatgacgggaagggaggttggacacactttgttatatctcctctcttttggagccacaacttaccaacattaacaataaaatagagatcgggaggctgacaaaacagcctctttgtggcaataagacaccaaattataaacaagatataaagccatggcaggcaaggggatgcctgaaggccatccagcacattgtaatctcatcatattgtgcaggtcatattgtggttgactgcttaaagtggacattcctttctgctaactcccaagttttatttatttatttattatttatttttattgagatggagtcttgccctgtcacccaggctggagtgcagtagtgtgattttagttcactgcaacctccatctcccaggttcaagtgatcctttcaccttagcctcctaagtagctgggactacaggtgtttgccaccacgccccagttaatttttgtattttgagtagagacaagcttccaccgttttgaccaggctggtctcgaactcctgacctcaagtgatccgctctcctcggcctcccttaaagtgctgggattacaggtgtgagccaccgtgcctggcctttgctaactccaagtttttagacaaagttatgttcctttaaccaattgcagattaaagaatctctgagtaggccaggtgtggtggctcatgcctgtaatcccagcactttgggaggcagaggtaggcagatcacttgaggtcaggagtttgagaccagcctggtcaacagggtgaaaccccatctctactaaaaatacaaaaattagccaggcgtggtggtgtgtgcctatggtcccagttactagggagtctgaggcagaagaatcacttgaacccaggagatggaggttgcagtgagttgagatcgtgtcactgcactccagcctgggcgacagagtgagactctgtcttaaaaaaaaaaaaaaagaatctttgaagctggacaaggtggctcacacctataatcccagtactttaggaggccaaggtaggaaaatcgcttgagctgaagagtcggagaccagccaggacaacatggcaagaccccatttctgcaaaaaatttaaaaattagctgggtgtggtgacgtgctcctatagtctcagctacttgggaggctgagacaggaggattgcttgagcgtgggaaatcaaggctgtagtgagctatgattgtgacactgcactccaggctgggtgacagactctgcctcaaaaaaaaaaaaaaaaaccaaaaaaaaaaactctgaatctgcttatgatttgtaagcccctacttcaaggtatcccacctttttggactaaaccaatgtgtatcttccatgtataaaatcaaactgtaggccggggacagtggctcacgcctgtaatcccagaattttgggaggccgaggcaggtggatcacttgaggtcagtagttctagaccaacctggctaacatggtgaaaccccatctcttccaaaaatataaaatatcagctgggtgtggtggcacgtgcctataatcccagctactcgggaggctgaggcaggagaatcacttgaacccaggaggtaaaagtttcagtgagccgggatcgtgtcactgcactctagcctgggtgacagaacgagactctgtctcagaaaacaaacaaacaaaaaaaccaactgtatgtagcccaaccacttctggtgcgctttcttaagcctttttgagactgttaccccaggccacaggcactcctattggctcagaataaacctctttaaaacattttacagagtttggtttttcgttaactatcttttttttctcccctctttgggtacagggtcctgctctgttgcccaggctggagtacagtggcatgatctcactgcagccttgatttccgggcgctcaagtgatccttctacctcagcctcctgagtagctgggatcacaggtgtggaccaccatgcctggttaattttgtttgttttttgtacggacaaggtctctc[132 bp omitted]ttgtctctctgtgttggaaactgcaaggtattcacagtaaagccaattttttttttttttttttttgagacagattctcgctctgttgcccaggctggagtgcagtggcgcgatctcagctcactgcaacctctgcctcccgggttcaagggattctcctgcctcagcctcccgagtagctgggattacaggcatccgccaccacacctggctaatttttatatttttaatagatacagggtttcaccatgttgaccaggctgatctcaaactcctgaccttgtgatccgcccgcctcggcctcccaaagtgttgggattacaggcaggagccaaggcgcctggccggtaaagccaatttaaactcagtggagcctgcaagcattaattaacacttctgtttgaaaatggtaaagtgacagagcctgccaaagaaaggcctcagagctctctttaccagagttgccgggagtgaagagatgaaaaatgaccttgggggagcttcagaattaatttcatttcatgcaaagaaaaacaaggttaaaaacatttcaaggcaataaagtatcttcaagtgccagcactgggcaaataaaccagcagtcccaggtggtgggggagaagtgatcaatggagcagggtgtgtgccaagcaggggacttcagtgtcagtgccgctctatgctgtctaagaagggggaggtgggagttacacagtcagtgtgtcttcagggtcagagagatgcactctcggagtccctgtcactggtttttaggctgctggttgatctgaaggcacatgttttcaattctgcagcagctgcgggccttcctagttcctggagccttgctctttttctttctttctttgtttctttttttcttttttattttttttgacatggagtctagctttgtcgccaggctggagtgcagtggtgcgatctcagctcattgcaacctccacctcccaggttcaagccattctcctgcctcagcctcccacatagctgggactatagacgcacactaccacgcctggctaatttttgtctttttagtagagatggggtttcatcatattggttaggctgctctcaaactc[135 bp omitted]accttcgcctcccaggttcaagcgattctcctgcctcagcctcctgagtagctgggggtacaggcatttgccaccatgaccagctaattttgtatttttagtacagatggagtttttccatgttggtcaggctggtcttgaactcccgacctcaggtgatccctccactgcagactcccaaagtgctgggattacaggagtgagccaccacgtccagccgggattctttttaggagatggggtcttgcactgctgcccaggctgaagtgcagtggtgcaattataactcactgcagccaccaactcctaggctcaaacgatcttcctgcctcagcctctcaagtagctgggactagtagtatgtgccaccatgtctggctaatttttttttcttttttgtagaggtgggatcttgctttgttgcccaggctggtcttgaactcctcaagccatcctcatgcctcggtctcccacaatgctgggattgcaggtgtgagctacagcgctccctggacaatcctctctctattctcagaagggtttctcagcccagcccctttgacattcagagttcatcattttttgtggttgtgtatggcgtcgtggggggctgtcctgtgtattgcaggatgttgagcagtgctcccagcctctgtccagtagatatcaggagctctccctcctgaagttatgacaaccggaaccaccccaggtgttgtgaagtatctcctgggagcaaaactgtctccctggctccctgagaagcactgttgtggggagtggcaagagttagctgagtctgaagacttctgaggcactcagaattgaaaagggactgctgcggtttggaatgggtcaagtttatctctttgagtaaaactgtctccatgggctgggtgtctgacgcctgtaattccagcactttgggaggccagggcaggtggatcgcttgagctcaggaattcaagaccagcctggacaacatggtgaaaccccatctctacgaaaaaaaaattagcgtgcgtggtggtgggcgcctgtaatcccagctactcggggggctgaggtacaagaattgcttgaacccaggagggcggaggttgcagtgagccgagagtgtgcccctgcactccagcctgggcaacagagtgaccctatctccaaaaaataaaaaaaaagttttcacataatttagcacttaattgtttggtgggtgtggtggaaagaatcatgagtgcccaaagatgcccatgtcctaatacacagagcctgttaccttatatggctgtgatgaagttaatgattttgagaaggggattgtcctcgattatctgggtgggcccagtgtcatcatggggctcttgtaagagggaagcaggagggtcagagtcacagaaggagacgtgatgatgtcatgtcagaagcagaaacaagaaacccggcacggtggctcacacctgtaatctcacactttgggaggctgaggtgggcagatcatttgagcccaggagttccagaccagcctgggcaacatagtgggaccccatctctataaaacaatacaaaaattagccaggcacacactgcctgttgttccagctacttgggaggctgaggtggaaggtttgcttgagctcaggaggtcaagactgcagtgagctgagtttatgccactgcactccagcctgggcaacagagagagaacctgtctcaaaaaaaaatttttttttaaagagacattattttttagagcatgtgtaggttcacagcaaaattgagcagaaagcatagagtgcccacatatcccctattcctcctcccccacccataaccccccgactatcaacgtcctccatagagtgggtttgttacaactgatgaacccacattaacacatcaccatctccccaagtccctagttcacacgagggttcactcttgattctatggattttgacgaatctatatggcatgtgtccaccattatagtggcacatagaatagtttcaccaaaattttacctttttttttttttttgagaaagggtctcactctgttgtcctaggctggtgcacagtggtgtgacccttggctcactgcaacttcactgcagcctgagacctcccaggctcaagtgatcctcccacctcagcctgtggctacaggcacacaccatcacacccggctaatttttgaattttttgtagaaacagggttttgccaggcctggcgcagtggctcatgcctgtaatccaagcactttgggaggccgaggtgggcagatcaggaggtcaggagttcgagaccagcctggccaacatggtgaaacttcgtttctactaaaaatacaaagaattggctgggggtggtggtgcacgcctgtaatcccagctacttcagaggctgagacaggagcatcacttaaacccgggaggcggaagttgcagtgagctgagatcacgccattgcactccagcctgagcgacagagcaagactccatctcggaaaaaaaagagttttgccatgttgcccgggttggtaacccctgagctcaagcaatttgcccacatggtcctcccgaagtcctgaaatgacaggtgtgagccgctgtgctgggcaaaattttattttttattttttttattttttgtgagacaaagtcttgctttgttgcccaagctggagtgcagtggtgtgatcttggctcactgcaacctctgcctcccaggctcaagcgatcttcccacatcagcctcccaagaagctgggactacaggtgtgcaccatcatgccagttaatttttgtattttttgtggagacaaggtttcatcatgttgcccaggctggtcttgaactcccggccttaaggaatccacctgcctcagtctcctgaagtgctgggattacaagcgtgagccactacaccccagcaaaattttacttttaatgaagactgcggaccacaagaaatgctagcattgtcagtattggctcactcagtaggtacccagtgtcattcccagacagcttcacctagcacctataactttggccagttgtctactaaattatttgttataaggaggagcaggcaagaaagatcagtgtaaaaatcaccccaactgtatgaaaaatgtttaaagcatgcctccttattgggataaattctgcaaatccccagctcctactgtagggtagaggaaaggaatacaccagagagcaaaagccacagagctgtgccctcccagaacctccaatccaacacagcatcacacagagcttcagcaacactggctgtgcacagtctgcacacccggaacaagccaggatttgcccggataaaacaacacaactttcttatgagacattcgagctgggctttcagctcctagcaaagtcctatgtcaaacaaggccaggccaagctccaggatgcccgacccctgggcaggttttctctcccaaggtttcctctttcctccagtttgttgcttgccctgtcagggtctgaggaaggatgacaacagagaaacctagattctggtcccatgtgggcatctgcaggcaagtcatagacactctggaccaaatatcctcatctgaaaataaaggtttggccatgatggcttccagggtgtctgttagtcaagaaatattctgggcctggtgtggtggctcacatctgtaatcccagaactttgggaggcaaaagcgggaggattgcttgaggccaggagttcaagaccagcctgagcaacatagcaagacccccatctctacaaaaaataaaataaaaattagctgggcatggtggcatgcacctgtagtcccagctacccaggaggttgagatgggaggattgcttgagcctaggagttcaaggttacagtgagttatgattgtgccactgcactccagcctgggcagcagaacaagatccatcccagcactttggaaggccgaggtgggtggatcgtgaggtcaggagttcgagaccagcctggccaacatggtgaaaccctgtctctactaaaaaaaatacaaaaattagttgggcatggtggtgcgcgcctgtaatcccagctactcgggaggctgaggcaggagaatggcttgaacctgggaggcggaggttgcagtgagccgagattgtgccagtgcactccagcctgggcgacagagcaaaactccatctcaaaaaaaaagaagggaggaagggaagggagggagggaaggagagaaggaaggaaaagaaagaaaaggaagacaggaaggaaggaagggagggagagagggagagaaggaagaaggaaggaagacagaaaaagaaaggaaggaaggaaaatgctctcattcggctgggtgcagtggctcacgcctgtactcccagcactttgggaggccaaggtgggcggatcacctgaggttgggagttcgagaccagcctgaccaacatggagaaacccagtctgtacaaaaaatacaaaatcagctgggcatggtggcacatgcctgtaatcccagctactagggaggctgaggcaggagaatcacttgaacctgggaggcagaggttgcagtgagctgagatcgcgccattgcactccagcccgggcaacagagcaaaacgctgtctgaaaaaaaaaaaagaaaagaaaatgctctgattctcacccaggtggagtccctgcaggacccatgctcaccactgtttctatgtccctagtcaaccaaacaccaccaacccttagctagtagcttcagatgaattccaaatgcctaggcaaaagttttagccatggccctctggccttctaatccttcatggcttaccaaattaacaaattccaggcggaaatggtctcttgaagtgtgtaggaatcactgtgctgtttttgaagtcttgcatgaaagaaacctcagggctcggagaccaggctcacatcctttcgtgccctgcagagggcgacccgctcttgcaatcggattttctgtattgtgagggagttactgtgaagtgtgcctcctttttgtgtggctaacccccagggctgggacggaagaggaattgaactggcatagtaaattaaaatgcaatttgaacttcaatgcagcctttcaaatgaggctctgctgcgctctcctgacacccctcctcaattcttctctggggtggcatggaggtatctgatgttcctatttaaatccctgagttcatacactgtccttatctgtcatttcctctttgaaaggcactgagaactcaattcagggaaaattgaaaacctttccagatattactgttttgaaagtggttttgccaaaaaatataacagcaaataaactctagtaagaatgagattcatttagctcttgttgcctttgacctcagaagaaaacatctaacaggaagcctagaaagtcacagttaaatatataaattcattttgaactaagagtccttttttttttcttcagcactagaattcctgcagtagaacaggtatatatatatgtatatacatttttttacatcaaaaccacttagaccaggtgcggtggctcatgcctataatcccagcaatttgggaggcca[134 bp omitted]gaggcaggagaatcgcttgaacctgggaggtggaggttgcagtgagctgaaaatacgccactgcactccagcctggatgacagagcaagactccgtctcaacaacaacaacacttaatgctgcctcaggttgctaagaggagcctggagagtggaaagttgtgtgcacaggagagactttagtccactgtcatttgtgcctttaccattgtcgtcttttcagtggcccttattattggggagttttgctgcttgtagtcattcaatgacattttcctctagccctcagtgactgctgcaatccccttttcttttctctttctttttttttttttttgagatagggtcttgcttattgtccaggctggagtgcactggtgcaatcacagctcgctgtagcctcgatctctgtattagtccattctcacactgctataaagaaatacctgcaactgtgtaatttataaagaaaacaggtttaattggctcacggttctgcaggctgtacagaaggcatggctgggaaggcctcaggaaacttacaatcatggtggaagttgaagttccatatctggagcaggaggaagagaggggggaggggctacatacttttaaacaaccagatctcatgaaaactcactggcacaacaacagccaggaggaagtccacccccatgacccagtcacctcacaccaggcccctccctcaacactggggattatagttctacaggagatttgggtggggacagaaatccaaaccatatcaacctcccaggctcaagcaattatcccacctcagtatcccaagttgctgagactgcaggtgtgccaggtgtgcaccaccatgcacagctaattatatatatatatatatatatatatatatatatatatatatatatttttttttttttttttttttttttttttttaagaaatgggttctcactatgttgcccaggctgatctcgaactcctgagctcaagtcatccttctgcctcggcttctcaaattgcaagaatcacatgcaagagccattgagtccagcccctttgcttttctacgtgaacttagtatgggagttatcaggttgattctggaggtcatttgtccctcacctgcattcaaggaatagattctcccatcctcagtgtttgccatcagaaagacgtagctgccatccaacttaagctgcccttgctggaatttagatgaattttcctgttatctttatagggtgagtcggttacccttctgtagtgggtgaagtcgtgtcccccagaaaaatatgtccaagtcctaaccatcggtacttgtgaacttaaccttatttggaaatagggtctttgcagatgtcattaagttgaggatccccagaggagatcattctagattcagagtacctactacatctaatgactggcatccttataagagaaaggagagggagatttgagacacagagacgcatagggaaaggtgacatgaagatgaaggcagaggccagacatggcaactcacacctataaccccagcactttgggaggccaaggtgggtggatcccttgaagccaggagtttgaaaccagcctggccaacatggcaaaaccccatctctactaaaaatacaaaaattagctgggtgtggtggtgtgcacctgtaatcccaactacttgggaggctgaggcaggagaatcacttgaacctgggaggtggaggttgtggcgagccgagatcatgccacttcactccaacctgggtgacagagtaagactcggtctcaaaaaaaaaaaaaaaaaaaaaaagatgaaggcagagatgggagcgacgcgtcgacaagccaaggaactccagctattgctgggagagggcgtggaatggattcttccttggaggctccagaaggaaccagtcctgccaacacttcgatttcagatttctggcttccaaactgtgagaaaatacctgtctggtgttttaagccacccagcttgtgatagtttgttatggtgacccgaggaaagtaatacgccttctctccagggcattaacatttgggcaagggtgtgtaatgattctctcatttttaacttccagttaaataatcctgtttttgaataatttatgttctaagacttccatttttagatgctttccttctgtgcccccttcccttgggccactgcagacttcccttggcacttcttcttctcccagaggtcacctcccagcaggctctgctccggggatgcctggtgggtggagggctgcctcttcccccacttcactggggtgggctgcttacatcttgaggctcaatcacatgcatcagaagctgcaaagtcccagaaggcagatattgttttctcctaccttgtcctcagtttgctgttgatttcctaaaaatagactttaccttttaataacttcctagcttgccataattgccaggtcccatgctgttggatagatgggacaggcaagagctcggcagccactgtgagtccctcctgtaggggagggcaaatggcaagggttgtcccagagggccccagagtgcttggcccaggtgagccctgctctgaaaggagagacttggatcccctttgccctaacctggggccaagctctgaaaggacagaggttcccttctgctctgagctgcctcctctgggcttgcaggagaggggatagcaaaggctctacccaacctcagcagctgggggagtccagaggcctctggagtgctctgcaggtgggcagcctggggctctccacagtgtctcaagggacagcttcccctggggcaccacagtgggaaagatgccaggcagagaagttccctttttcctccgggctgtgttgaaaggtggttactggaaccacttactctgttaacaaaaatcaactgtctgtccttaggttatgaagggtgggggatggagggcgcagtgtggggagggaaagttggagtcgggggtgcataaagggaattgactttgcagtcccaactcttcttttctagaatccaagattcagtctccccttggatgacagcgtctctctctatgtctagttttgtaggatggggatccaattttattaaggtagagagggcaggtccttgccatgcaggaggcaatcaggaggaaatcactccagagcagttggcatgctctcaggtccatctggcacctgccccagggctgccttgctagcagaaaccattctgcccttaacctccggtaccctgccaaggaggtcgccattcctggggcatctgctgctattgggagcaggcttcctggccaggggccagctgtgagggccccttttctaggagcagagtaggaagccatgcggtgtgggcacaggctgccaacatgatgatcctctccctatgctgccgagaggggccttggggacagagaagcttgggttcacattacatccccccacttcttagatgtcaccctgagcaaaggtgtaacttttccaggcctcgatttcactgcagcactcaagaaatggctacttcatggggttaaggtgagcatcatttagggggtgctcaaatggtcctttgattaggtataaataaggagtgagaccactttgcacagaggagaccctcaataaattcagtgaatcagaaacatcacaattatccccttctcctgagagaaggagcatgtggaccaatgccagcctagatcaaaatgctggtcgtccttttttttttttcttttttttttccttgagacagactcttgctttgttgcccaggctggagtgcagtggcatgatccccactcattgcaacctccgcctcttgggttcaagcaattctctggcctcagcctccagaggagctaggactacaggtgcatgccaccacacccagctaatttttgtatttttagtagagatgggatttcaccatattgaccaggctgatcttgaactcctgacgtcaagtgatccacctgcctgggcctcccaaaccgcttggattacaggcgtgagccaccgtgcctggccatcttttatttatttatttatttattttgagatggagtctcactctgtcacccaggctaaagtgcagtggcgtgatctcagctcactgcaaccttcgcctcccaagttcaagcagttctctgcctc[223 bp omitted]tttttctttttttttttgagatggagtcttgctctgtttcccaggctggagtgcaatggcgcaatcttggcttactgcaacctccacctcccgggttcaagcgattctcctgcctcagcctcctgagtagctggaattacaggcgcctgccacctcgtccagctaatttttgtattttttagtagagatggggtttcgccatgttggccaggctggtctcgaactcctgacctcaggtgatccacctgcctcagcctcccatagtgttgggattacaggcatgagccaccatgcccggcccaccttttccttttaaacaatggattttgccacttgatctggagctggggtcctggaggcctgggtcaggatgggaaagggggtggggtcagccctggctgtggcagagaggctccgaagctctggacccggcagagtggagtgcaggaggctctgttcctcttctggcacggggccagtggatgctggcctccactcagcatcacttcatggtgacatcaagcccgtgatcttcaaggcactttgtcagtgtacagccagcagcattatgttggagctgtccctcatctttgcaatcatctagttcaagctcctctcttctgcagctaaaaacgtgggtgctcatgctgagatcacccacaagcactgcccagctgtcacttgggcctctgaaggaggccagtgaggaggaggagtgtgtggggccactgggcctagcaccctctgggtatgagcctgggctttagaatgaggtggaaggtggaggaggtgggtattgggaagcggcaggagggcttttgggaaacttggaattcccactctcagtgacgtgtcttaggagccccctggaacatttctatttcaactgagttgatctgaggaactctgaccaccattttcacccagtggcattcaaggtaaggaaaagcgaatattttttcttgttgttgtttgagacagggtctcgtctgtcacccaggctggagtccagtggcacgatcacagctcactgcagcctcaaccaaccaggctcaagcaatcctcctacctcagcctcccgagtagctgggactaacaggtaggcaccatcatgctcggctactttttgtattttcttttttatagaggtggggttttgccatgttgcccaggctggtcgcaaactcctggactcaagtgatctttctgcctcagcctctcaaagtgttgggattacaggcgtgagccaccgcacccggccataattattttaaatagagttgaagtctcactgtgttgcccaggctggtctcaaactcctgagctcaagtgatcctctggctttggcttcccaaagtactaggattacgggcatgagccagggtgctttgcctaatttttaatttttttgtggagacagggtcttgctatgttactcaggcagatcttgaacttctagcctcaagcaatcctcctgcctcagcctcccaaagcgctgggtttacaggcgtaagtcactgcttttggcctcctctaaccttgattctgtattcccctctcctgggtgcctgtgcacacatacacacacacattcacccgc[135 bp omitted]tgcctcctgggttcaagcgattctcttgcctcagcctcccgtgtagctgggattacaggcatgtgccaccacgcccggctaatttttgtatttttagtagagacagggtttca[132 bp omitted]tcacccaccacacctacacacaccacacacactccctgtcctgcacacctctgcacacacgcacctgcccagagcaccttgctggttcccccgctcctgctcttggatggttgagctttgccgagacacgtctggaagtggagttgatctgctcaccctccgttttgctcccccgaccccagcccttcctgggctgtgtctcctcttgactgtccttcagctgcccgcagccttgccttcagcatccttccacccaccttgagtgttccaccgtaaacctaccccctgctctgggattcgcctcatgctttcctgagctcagtgccatcctgcatttccctcttcagctcctctcctcacggtcagccgggctgaatagggtccctccctccctgccatttgatggcccatcggttgactgattcctgtcctctcatgcggctgagcatagccggggtgttagtttcttgtggctgctgtgatgaatgaccacaaaccggatgtctggacagcaggtattttttctctctttatttctgagacagagtcttactctgtcgcccaggctggagtgcagcggcacgatctcagctcactgcaagctctgcctcccgagttcatgccattctcctgcctcagcctccagagtagctgggactacagacgcccgcccc[138 bp omitted]cccggctgacagcaggtatttatttcagttctagaaggcagacatccaaaatcaaggtgtgggagagccgtgttccctccgaaggctcgagggtagggtccgtttcttgcctcctccagcatctgggggctccaggcactccttggcttgtggctgcatcactgcagtctctgcctcggtcttcacgtggcctcctcctcctttctcctgcattttccaggaggagcttaactccaatgacaagtgtccttataagagaaaatgggccgggcgcggtagctcacgtctgtaatcccagcactttgggaggctgaggcgggcagatcacctgaggtcaggagttctagaccagcctgaccaacatggagaaaccctgtctctgctaaaaataaaaaaaattagccgggcgtgatggcgcacgcctgtagtcccagctactcgggaggctgaggcaggagaatcacttgaacccgggaggcagaggttatggtgagctgagatcgtgccattgggcaacaagagtgaaactccgtttcaaaaaaaaaagagaaaatgttcattttccaatgaaaatccaggcggattttcttaaatctctaggcccctaatttaattacttcggcaaataatgtttttccaagtaaggcctcattcacagattctggaatgtggatgtagctttttgggggtcactattcaacccactgcagaggaggtgcgtgtgcattgggtgcagtggcagctgtgtttctgagctgtccttccctccaggggctctctacaagtggggctgcaacgtcctagggcagcctctctctcctgtctccctctctccagcacctttgcctcactttataaacgctttccctcttgaacatattaacaaactaaagaccatttttatttttttaaaatttgaggtggagtctcgctctgttgcccaggctggagtgctgtggctcgatctccactcactacctcctccgcctcctgggttcaagtgattctcctgcctcagcctcccgagtagctgggattacaggtgcccaccaccacgcccagctaatttttgtatttttagtagagatggggttttgccatgttggccaggctggtctcgaactcctgaactcaagtgatccgcccacctcggcttcccaaagtgctgggattataggcatgagccaccacacccagccaaaagaccatttttcttaagaccatgaccccttgaactccattcatccaattttccttagctcccagactgcctatcaaagccattcacattccttgtgtcaccaccgtgggccctgtcctctttactctgtgccatctgccaggcagcctgctttcccaggggcacccacagccccctggtaggtacatggagtctctcttcctggactcggcatcctctgtctctttcctgtgttttgtgtagtgggagttggcggagggattccctccctcagcctcatgaccctccccagtttagcatccatggacccactgggggtcgagcaccagcagtgaacagacctggggtctcagtttgaccccttcgtagctatgtgacagtgttgagggaggcacctcttcgctgggtcctggtgtactcggctgtaccacacaggccctcaaggcaccgtggagggcaggactggacagagcagtggcaggtgcccgtgagcggaaggggagcattgaggtggaggtagccaattctgtttctccctgcgctggtccctgtgagtgagtgtgtgtaacttccacatgcaagggcggctgctgtccaacatgaggcaagcaggacttctctcccccactctgcgctgaggatgggctggggaggaaacgaggcctgaaggcgtccaggctccgggatgtctccctctgcaccggtctcatcatttcggtgcagattgaggtttcttcttgtgaaggctgttaacaaccaagtgagagccgggctatcaaatgccgagtaataagatgcctgtacctgctgcttcctggccggagtgatggtgcatttctgctgctgaaattgcatgtggattaattaaaacgggagtaagtatttctcctgaattattcaccagcttccaggagatggaaccatcactgtggcgtcttgttacaggagtgctgtggcctctcctctggtggagcaccggaagtggaaggcacgctcccggggctggggcgtgcatgtagggggtgcggtgaagctgatcagttctgtggctttgaatccttgcatatccggaagtcacagagaattggaaatgccctgcacgggagaggccagcggaataaccctctagaaagttctcctgcagagaagtaggagcctcctcttccttccttttttccactgacgagggcctgcactccgcagggaggcctcaggagactcggtttccatcctgcctctggtcggggcagtggcctctccatgcctgatggcaggtctgggctgagcaaggggcccctaggtgtcccagtggtgcttgtgggctgttcttgtatctgactgtggagtgtcagagtgtgtgttccatgcccgcctggcccttgtgtgggtatttgtgggtgcctctgtgtgctgtgtatgagggtgccactggaacggggctgaccaagctcttggccaatgatcccatccacctttggtcccttgtgctagtgggaagggctgagggtgctggtctgagccttctggatgacccctcagtcctgacactggttcttcagatgaggttggctgtcccttccccacgtggtggctctttttatttttatttttttgagataggatctcactctgttgcccaggctggagtacagtggcatgatcttggctcactgcaaccttgacctccccgggctcaggtgatcctctcacctcagcctccccagtagctgagaccacaggtgcgtgccaccatgcccagctaattttaacaacttttagtacagatgaggtttcaccatgttgcccaggctggtcttgaactcctgagctcaagcaatctgcccacctcagcctcccaacgtgggtggttcttgatcagtccccacagataatttttctcttgggccaccttgactggagacgcctcatctgcatgggccctttgccgtgccgtgccgtgccgtgccatgccgtgctcatcccgtttctctttccaggccacaggtccaccctgctccggccccagtgtcttcttactcactctcccttccccttgggccaatttccaagctgcctctgcgactggagtttagccaaggcgagctcagttacacatacctgagcatgcaccccagcaggcctttcctggggcactagagctctttcttttctttcttttttttttttctgagacggagtcttgctctgtcgcccaggctagagtgcagtggtgcgatctcggctcattgcaacctctgcctcctgggttcaagcgattctcctgcctcagcctcccgaatagctgggattacaggcacctgccactgcacctggctaatttttgtatttttagtagagatggggtttcaccatcttga[132 bp omitted]ttcaggaagatggatgcttatgtgtatcctgcagcaagaggatgagtcagtaggacatgtcaggggtgtggagggaatctttgaagctagcggggcctggcacagggtattggcattggatctgggcagagccaaggagtccaggctgcctctctccatggggacacctgcaccctcctggccgagggaaggcaggcagccagcagggtacttcggctgggatctgagtgtaatgaaatatcgagcagtctattttatggatggattcttctcatacgttcaagatattaaaataaaaattattcttaaaagcttgaattggaatagaagtaatgtcccacagtaagcaaggtagatacccctttggctggcactaaattttctccgaaataggctgttttttatgtagaagagggagagagagtcatcgtaggtaagtcagacaaactgagcttcttagcttcagaaacctgaaaacaggctgggcatggttgctcacacctgtattcccagcagtttgggagcctgagaagggaggatcacttgaggccatgagttcaagaccagcctgagcaacatagtgagactctgtctctcccaaaaaaaaaaaaaaaaaaaaaaatagccaggcatggtggcacatgcctgtagtcccagctacttgggaggctgaggtgggaggatcgtttgagctcaggaggttgaggctgcagtgagctgtgattgtgccactgcactccagcctgagtgatagagcaagaccttgactcaaaaaagaagaaagaaatctgaaaacaaaagctgtctgcctctcctgccccacttcctcctgcctcagggttagtggattgctttgactttggaagaatttggaaagtttatatatgaaaatgacaataatagctggggtgtggtggtgtgcacctgtggccccagctacacaggagactgaggcaggaggatcacttgagcccaggacgtcatggctatagtgagctgtgtttgacctgctgcactccagcctggtaaatagagcaagaccctgtctgaaaacaaaaaaggccaggcgtggtggctcacgcctgtaatctcagcactttgggaggccgaggcaggtggatcacctgaggtcaggagttccagaccagcctggccaacatggtgaaaccccatctgtactaaaatataaaaattagccgggcatgatggtgggtgcctgtagttccagctactcaggaggctgaggcagaactgcttgaacccaggaggcggaggttgcagtgagctgagatcgtgccactgcactccagcctgggcaacagagcaagactccgtctcaaaaacaaaacaaaacacaaaaaaaccccaaccaaccaaccaaaaaaactacaataatacaacatgcaaccttgaaggtttgatatagaaatctgtgctcacgtttttctggctgtacctcttatttgtgactatgtgtgtaagaactgatgtgagacttggtaattgtccgtatagcatgtgtgtatgtctgtgtatccgggagctattgctgtgtaactcagcgcctcaacacacagaggcctataacagcaaacatgtattgtctcatttattactatgggtcagaatttgggcacagcttagctgggtgcctctgcctccaggtctctcaagaagcctgtggttagggagttggctggggtctattgtgatcagatggctccactggggaacgatcaaattctaagcttgctccctggttgctggcagaactttctttgctggctgttgatcaaggactgccctcagtttcctgctgcagaagcctctttgtaaagcagctatggcaggaagagtcaccctcagagccggcgagagagagaggggtgagtggacagaagccaccatttatttctcttttcctttttgttttgagacagggtctgattccattgcccaggctggagtgcagtggtgtgatcacagcccactgcaacctccacctcccaggctcaagtgatcctcctgactcagcctcctgagtagctgggactatgggcatttgccaccacgcctggctaattcttgtattttttgtagagttggggttttgccatgttgcccaggctggtcactaactcctgggctcaagtgatcctccccccttggcttcccaaagtgctgggattacaggtgtgagccaccacactggcccatggtttctttttgtaacctggaagtgacatcttatcatttctgtgttatatttgttggaagcaggtccagcccacacccaagggaaggagattccgcaagggcatggataccaggaggtaaggaccattggggccatgcgggaggctgctgcctcgtctctactggttaggggagtgtacacatgctggcaagagagacatgggattttggttttgcaggtgcttttttttttttgtgatggagtctctgctgtatgcaatggcttgatctcagctcactgcaacctctgcttcccgggttcaagcaattctcctgccgctgcctcccaagtagctgggattacaggcgcccgccaccatgcccggctaatctttgtatttttagtagagatggggtttcaccatgttgtccaggctggtctgaaactcctgacctcaggtgatccacctgccttggcctcccagagtgctgggattacaggcgtgagccactgtgcctggcctgcagatgctattaatatctgcagatttatagatcaggagcattctctaggctatcaaggagagcctcgtttaatggtccattaatttatttgacttgtatgttttgcaaacaacttgctcctgcctatgatagaacatccggttgaaatccacaaattacagatacgtgtgacagcaggcagctgcacatacatgaaaacatcagttataaaatgtccgcatgaaaagatgttttgccaaagatcgtaggcttctagatgggggctctgcctgaaaggtgggcgagagtttatccttcagggcagctgggtagatctgcattaatgaatccacaggctggtgcttgtcctgaacaccaaggtcctcaggcggtgagttccctctcattctgctgctggtgagaatgacttggcaagcctcatctgaccccactgagcaggctgggccagctccttagtaactgggccgagtacttggggagggcaagcagtgccaggctactctcttgctttccagaacaaaaacatattttattttttatttttatttatttattttttttgagtcagagtcttgctctgtcacccaggctggagtgcagtggcgtgaactcggctcactgcaagctccgccttccgggttcacgccattctcctgcctcagcctccctagtagctgggactacaggtgcctgccaccacgcctggctaatttttttgtatttttttagtagagacggggtttcaccatgttagccaggatggtcttgaactcccgacctcaggtgatccaccagccttggcctcccaaagtgctgggattacaagcgtgaaccactgtgtcctgacaaaagcatattttaaagcaactcagagtcctgggaatgttcagggtaggtcttgggcgtgttgtcccattccatttaactaaaggggatgtattggtcagggatctctagagggacagaactaataggatagatgtatatatgaaggggagtttattaggagaattgattcacacagtcacaaggtgaagtcccacaataggccttctgcaaactgaggagcagcgaagacagcctgagtcccaaaacttcaaaagtagggaagctgacagtgtagtctttactctgtgtctgaaggcctgagagcccctggcaaatcactggtgtaggtccaagagtccaaaagctgaagaattttgagtctgatgtttgagggcaggaagcatccagcacgggagaaagaagaaggccggaagatccagagagtgtccttattctacgttcctctgcctgctttattctagccacgttggcagctgattagatggtgcccacccagattgcaggtggttctgcctctcccagtccactgattcaaatgttaatctcttttggcaacaccttcatagacacacacaggaacaatactttgtatccttcaatccaatcaagttgacactcaatattaaccatcacgggacatcccaagagtgaccaccttacgtcagcaccgtcgggcagacatgacttctgcttctgtaccccatcccttcctccatcatcttctgcactttgtgggaggccccgcttagcctggggggagcttccagttattctgaaagtgtggtgtggtggaaagtgaatgacttggccgggcgcggtggctctcacctgtaatcccagcactttgggaggccaaggcgggtggatcacctgaggtcaggagtttgagaccagcctgaccaacatggtgaaaccctatctctactaaaaatacaaaaattagctgggcatagtggcaggcacctgtaatcccagctacttgggaggctgaggcaggagaatcgcttgaagtcgggaggcagaggttgcagtgagccgagatctcaccattgcattccagcctgggtgacagagcaagactccatctcaaaaagaaagtgagtaactttgggactggatagacccttgaggatcctggcctccggactccccagctgtgagaacttagatttcccctctgtaaaatggggataatgccacctatttcgtcagacgtgtgaggatgagatgatgcatatatacaaagtccctgccagaaccacagatatattagggtcacatgactcttcaattctctcctcgtccctccccaaaacaaagcctctcttctgatattgaatgctgactttccatgtggagcttgttgcagaaggacattcctttttgtgtgggaagtaaggaaggtggaaagagtgtatgcatttgcaggggctgggagggtggcccaatggagacagggagcacagagcattgtgtctccctgcaaatgatcacgctgtcctgggcggggcctcctgttgcatgacagatgatggtactcatccagcccctccccaggacagcccagtcaattcctctgcagtgagttctatggctgagtctttggtgaggagttggggggatggtagagggtccattgtgaggggttcggggtataatggagggtcccttgtgaggggttggggggatggtggagggtcccttgtgaggggttgggatggtggagggtctgttgtgaggggttcaggatataatggaggatcccttgtgaggggttggggggatagtggagggtcccttgtgaagagttgcggtgggggatggtggagtagccatagagaatgctctagactgaatattgtatctccctgacaatcactatgttgaaaccatagctgtcagtatggtggtattaggagacgggccttaggaggtgattaggttagataaggcatgagggtggggccctctccatgggattagtgctcttgtatgaagagacccagagagcttgcgcgtgaattctctctgccatgtgaggacacagcaaggaggtggccatctgcaagccaggaagagaggcttccctgagaacaaaatctgccaacaccttgatcttggacttcccagcctccagcaccatgagacacaaatgcctgtgatgaggcctcccagtctgtggtttgcaatggtagccggagcccactaggacagagaggcttcccagcagcccctcctgagccttgctgctggcagctcccatacggcatagttatgggatgtctctttctgctggaggctgggacccagaagcataggaggggagtgaagccactcttcttgggaaaaggttgcttattgttcagcagaggagggaatggcagggggggacagtaaggcatggctgggaacccctgatattgagtggcctctcataattgagagaaaggtatatgggtagtaagctggggcaaagttaagtaggtatcttagagcagtgattagattatgttcgtccagtggccggctgcaaattccattactacagagtctgtgagaggctctttggggtcctctccagcctgatacctgcagctttggtaaggacgtccacagagtggtctctctgatttcagctggtgccttcaggtccccttgtgcaccccacatcagggcagatgctccacgacccaagcctctgtcatccagggacttcgtggactcaggggccaggcagaccccagcaggctgtgcctcgggggaagttgctccccaccccgacggggctgcatcagctcgaaagcttccctaaaagatgttccttttgttgttaaacttattttcgtcttgtctgcacagaatcatgcttatttctctccatcatttgtctatgaacagggacgaagaagagggacaaaaagggaaaacgatttgctgtcattgtatccacaaagtgcacattttctttgtacggctgaaatgtctgtgcgtctgagagcttgcaagcttgtctgaaatggtctaattgcctgatctcaatcctggctgggtgccttgcatctggcttttcatggatttgaattgggaggggccgttgggggagactctcctaactcagggatatttttaggaaatcaaagtttgcttttctgggtcgattctatcctctgtcatcgccacctcccaagctgcctccgcggctcttgtcacttgccattgtccctgggctctggtgggaggccagtcctgtgctgctgaattggaatcaggaccagaacagtcctgactgtccctatgggacccaggccgggggtaccccacccagccctgtgccaggggctttgtgtaagtcagcagttctcaaagtggggccctctgagacccaaggagttattttattttattttttgagacagagtctcactctgtctcctaggctggagtgcaatggcatgatctcagctcactgcaacctccacctcccgagttcaagcagttctcctgcctcagccttccaagtagctgggattacaggcgtccaccaaacacccagctaattttttgtatttttagtagagacggcattttgccatgttggccaggctgttcttgaactcctgacctcaggtgatccacctgccttgtgctcccaaaatgctgggattccaggcatgagcctccgcgcctggcctcgaggaggttttcgttcttctcaatcaaaacaacatatcacaatggccagaatgtagaagcagacagaagagtccacttgcttctttccactaagccagacattaaagagatctgcactactttatttattgagacagaatttcattctcttgcccagactggagtgcagtggtgtgatctcggctcactgcaacctccttctcctgggtttgagcaattctcccgcttcagcctcccgagtagctgggaatacaggtgtgcaccatggcgcctgggtaatttttgtatttttaggagagacggggtttcgccatgttggccaggctggtcttgaactcctgacctcaagtgatctgcccacctcggcctcccaaagtgttgggattacaggtgtgagccgccgtgcctggacttgcactactttaaaacagcaccttctgactaacattgtgttgttttaaaagaggttttttttttcataaaaagatgtgatttatgttaacatgtagtggtttattgttgctattttaagggagttaaataaaatttaaaatttctgttttaatttctaatacaataaatattgatgagtaacatgcatagaaacaaaacactttgaggcttcaataatttttaggagagtaaagggattctatagccaataagttagaaaatcactgatataagttgtgtcatttaatccttcaacttcctttatgggaggcagcataagcccaatttcagatgaaatctgaaagagatggagaagggaaacctttcagaaggaatttgtcctggatttt[136 bp omitted]gcccccgtctctactaaaaatacaaaaattagccgggcatggtgacgcatgcctgtaatcccagctacttgggaggctgaggcaggagaatggcttgagccccagaggtggaggttgcagggagccaagattgtgccactgcactccagcctggggtacagagtgagaatctgtctcaaaaaaaaaaaataatttgtccatgattttacagtaagcagctgaattgggatttttaa[212 bp omitted]gaggcaggagaatggtgtgaacccaggaggcggagcttgcagtgagccaagatcgtgccactgcactccagcctggtgacagagcgagactccgtctcaaaaaacaaaaaaacagttaatacatactatacaaaaaaatggaaaatgaaaaaatttaatctgcccatataagcctgccatttaatcttttagaatatttgctttgtcttcatatttaatttccataacctgagtcgtattgtctgtgcagttttatattctaaagcaggatttgaacccagagctcagacagagccaggccaagtggggaagggggcttgtgcctttttatctcttcacattctgacagtgtcctggaataggacctgaggttgtgtgtgaggggctgatttgcctctctcaaaaaaaaattcatgatgaaagttgggcctggtggtatgcacctgtagtcccagctactcaggaggctgagtgggaggatcgcctgagcacaagagtttgaggccagcctggccaacatagtaaaatctcatctcttaaaaaaaaaactaactcatagtgaatccctaacccctgtacttcagaatgtgagtgtatttaaagatgcggcctttaaagaggtgattaagttaaaatgaggctcagcgggcaata[223 bp omitted]gagacagaattgcttgaacctgggaggcggagtttccagtgagctgagatcacgccactactctccagcctgggcaacagagtgagattctgtttcaaaaaaaaaaaaaggaaagaaaagaagaggaaattcagacacacaaagagacagcagggaaggggcacagaggaaagacgtaggaggccacccaaagaatgcccgggccctgtctggggctgtccaccttcgccctgagcacacggtggaaggaagtggctcagagccttgtcacagggccctggagtgggagccctttgcttctggggtctgctctgggctgagaaggcttgaccctgttgaaatggctctgctggcctggaccccctgagacaggttccatttcagctggtgagctcagggcctggccttggacatggccagcgccagtgaaactggatctagaataagcagaaagacagctcagtgccatctttaactcacagtgcagggagtgagcccaggcttcagggcagagtgctccctccgcttgctgactctcagcctgggctctgtcctctgggctccggctgttgtaggacatcctgagaaaggggtcagccaggccgtgaacagtcaatggcatagaggcctgaagactccagtccttcctcctgtgatgatgacacgtcctaggtgaccacccttgagctgatgcttctttttttttttttttcccttcgagacagagtcttgctctgttgcccagactggactgcagtggcaccatctcggcttactgcaacctccacctcctgggttcaagtgattttcctgcgccgaggggctgggactacaggtacgcgccactgcacctggataatttttgtatttttactagagacggggtttcgcatgttggccaggctggtctcgaactcctgacctcttgatctgcctgccttagcctcccaaagtgctgggattacaggcatgagccacagcgcccggcctgatgcttatttctttcctctcatggtctacacttcctcccctccgctcacttcagtcctctccgctcttcactgaactggcctttgacaaggtctctgatgagcgacgtcacctctcagctccaggccccccagacagcacatttttcaggtgtcgtttctgagcactcaatgctggcctgtgcctggctcagctcttggctgtcttttctatcttagcatggtccaacagaggtgcttttttttttgtttttgagacagggtcttgctctgtcatccaggctggagtgcggtggcacagttactgctcactgatgcctcaacctcctgagcagctgggactgcaagcatgcaccactgtgttgggctaattttttattttttgtagagatgggggtctcagtatgttgcccaggctggtctcaaactcttgggctgaagtgatctgcctgcctccgcctcccaacgtgttgggattataggcgtgagccaccatgcccggccccaacagatttttctgccatgttggagatgttctctctgtgctgtgcaacacagtagccatgagccacgtgcaaggtggtcagtgtgactgagaaaccggtttccttttttttcctttcttttttttttttttgagatggagtgtctccctctgtcacccaggctgtagtgtagtggtatgatctcggctcactgctacctctgcctcctgggttcaagcaattctcccctgccccagcctcctgagtagctgggattacaggtgcatgccaccatgtccagctaatttttgtatttttagtagagacagtttcaccatgttggccaggctggtctctaactcctgacctcagatgatccacccacctcggcctctcaaagtgctgggattacaggcttgagccactgcatccggcctgaggtttccttttagtttcattttaatgaatttaaatgtaaatagccacagtggctgctggctgctggctgcggtgttggacagcgcctcctaggaggctgttaatacctgtgccgtgcctttgtagagcatctgccgctgtcttctgcatttctgttccctgcgctgacacctcccctgagcccccatgagatccatctcttcttgacacctctcctgggtgcctcataggcacatggattgagcacgtgaaaattctctgatcccaccttccccatcgcagagaacggcacctgccactgctcagcctccagattcaggagttgcatttgtttccttctttctcctgccctgagccagtcacctgggctcgtccctccagacatatcccaacctacacttccctccacccccactgcctcagcccactccggatcaggctggccctcccagctctctgcctccccactcctgtcccgtgtcccccagcccagcagccagagtgacccggctacagcacaaatcccagcacctcgctccctgcacccctaactgcaaccagaatccatcccagctgctctgtggtctggcctgcccagccctcccaccccatctcctccttccccttctagttgcccagtgctgacccctcccagggctcctgcatttgctgcttggaactacctccctggcacctttgtgtctcctcctcactccagtctgaattcagtgttacctcctcaaagaggtcttgtcccaacactcactagcacagcacgtcgtcttccttgtagagagcacgcagcccctccagaccagagctggacttccacagggagcatcagcccctccagaccagagctctgttctcatcactgtgttcctggtaaaacagtcttgttggcctccctgagccaagctctctgtcccttcctccctctcttcttttctacctccctctctccccacctgtctcttcctctctctccttttctccctctttctctccctgactccctctgttccctcagtcagtctctttctctcctctccccgccctcttgttccctctctgtctctctctatttctgtctcttttctcctctctccctctgtttctcccccgactctctctctgcctctctgtctctcccactctctgcttctctctctctctctctgcctctctttctctgcctctctgtccctccctctctctctctgtccctccctctctctctctgtccctctccctgtctctctctccctctctgtctctatctctctctgcctctctttcctctctctctctctccgcctctctgtctctccctctttctccctctctcttttcctctctctctctgcctctctctccctccccccacctctctctgcctctctgtctctccctctttgcctctccctccctctctctctgcatctctgtctctccctctctctccctctctctctctgcctctctatccctctctatctctccctctctttctccctctctgtctctctctccctctttctctgcctctctgtctctccctccccccaccccacctctctgtctctccctctctctttgcctctccctccctttctctctctctctctgcctctcagtctctccccctctctctctccttttgttccccccacccacccatgtctgtggagggctgtgtctccctttgccccaggacactccctttttttctcccccggttccggtcttttgggtgaagggtagaaggaagacaaaagctggaattcctgagcaagggaagtcatcactacccccacgctggagttgtgactgcccatgctgtggcccctgggtggcctctgatgcagccacgcaagggggttccactctgctccttactggacctgaccccaccccctccagcagcgtcctccggaagggactagtttccccttgtacccagtgggtccagggcacctggatcagtccttcagtaccttcatgtttcaaacaaacacctcttgtagctcaggcagcaaattgcgctgttcgtggggagaggggccgagtgccctgaccagtcggagctggaccggccagtgctcctctggtagagggtggggggatcacttggggtgggctttggctgggggaacctggaggcttgcaggctgggctcccagagaccttaggatggtctcatgcatacccaggtctattctgagccatgcaccaagcaccttggctggagtcagctcacttcctccccttattacaggtcccagcagccgcaaacccaaacttccccggagcaccagcacactccccattaatgataaggcaggagagctcctgctctttccagccgggactttaatttctctaattatagctgaggcttggagcagtccctcccacttaatctacttaatgcagacacacactccccccagctctccacccctacccggcttctgcctttaacccttttgctgctgggtggcagttctctgagtgggcaccttttaagagctgaattgcattcatctcaccaaattcgtatgttagaaccccaaaccctgtagctcagaatgtgaccattggagacagggtctttaaagaggtaattagggccaggcactgtggctcacacctgtaatctcagcactttgggaggctgaggtgggggtatcagttcaagacaagcctggccaacatggtgaaactctgtctctactaaaaatacagaaattagccaggcatggtggcatgtgcctgtaatcccagctactcgggaggcaggagaatcgcttgaacccaggaggtggaggttgcagtgagctgagatcacacaccactgcactgcagcctgggcaacagagggctactccatctcaaaaaaaaagaaaaaagaggtaattaggttaggtgcagtggctcatgcctgtaatcccagcactttgggaggccaaggcaggtggatcacctgaggtcaggagtttgagaccagcctggccaacagttgaaactccgtctctagtaaaaatacaaaattagccgggcatggtggtggcacctgtaatcccagctacttgggaggctgaggcaagataatcgcttgaacctgggaggcggaggttgcagtgagccgagattgcaccactgcactccagcctgggcgacaagagtgaaactccgtctcaaaataaaataaaaattaagtgaaaatgggccctatccaacatgatgggtgtccttacaagaagagggacacagacacagggaagaccaggtgaaggtcatgcaagccaacgtaggaggcgtgaacaaaaacccaaccctgctaacaccttgaacttggacttctaggtttcagaattgtggaaaaattgctgggctaggtggttcttgcctgtaatcccagcacttttggaggccaaggtagaaggatcat[133 bp omitted]acctcctgggttcaaacgattctcctgcctcagactcccaggtagctgagactacaggtgtgcgccaccacacccggctaatttttgtatttttagtagagacagggtttcagcctgttggtcaggctgttctcgaactcctgacctcagatgatccaccagcctgagcctcccaaagtgtgggattacaggcatgagccaccacacccagctgagaccccatcttttaaaaaaaaacaaattagttgggcatggtggcatgcacctgtggtcccagctactccggatgctgaggagggaggatagcttgagatcaggagattgaggctgcagtgagccgtgattgcaccactgcactccagcctgagcaacagagcgagactctgtttctaaaagaagaaaagaaaaattgtgaaataatagatttctgctggttgaggcacatggtctgtggctctttagcatcctcggctgtgagggagccatgtggctgctgtctgggaggcaggaagcacttctgcctctgaggaagcccctccaggaacccagctccaggaccagcagtcggggtggtcaaatgaaggtgggcccctttgctggcctgaccctggaggtggggacatctggtggcctcctggggaaggggactcagttgcatcacagccagtcgacccatgcaggtgccaggtgtgcacatgggaacgtgtctgtgtgcttgtgtgtgttcaaacaggagagactggtcaggcttagcgattaagcttacaccccttccccagcccacagagcacacagtgcaccatttctacaaggatctcagaaaatcaataggtgtcccatcagggcaggagcagctgagttcagcttgtgtttcctggagtgtgcctgtccccagatcatctgttctgtgatgccagaggcaggagtggagcttgtgcagagcttctgatgactcccggcccctctggaactctgagtcatactcttgccataacctccatggtcacagtcgtgcctgctaggcactcttattgtagagaccttctgaaggtcactgcaaaatcgtgatgccctaaatgcattgtggaccaagaccagaggcaggtggggctcctctttgacaggccccaggcccgggagatttgctgttaggaggaatcactgatgactgaacgtattctggggaagagagaagggggacggatatggagacaagtcaccaggaagaccccctgcgggacagattggaatcacagccctggaaaagggccatgacatgagcagggatggcctggagtgggggatgtggtcaggctgctgtggggtgctcctgtcttaacagtgaagaatggctggtggtccccaaacagcagacagtacagccctgctggacctgtgacctgggatgctgggcagttctgtgagggctcgactccctgcaatgcctctcctaggtcctcttctgcattctctcaccacgaacctcacccaggccagtctttcatgactgctctgctaagcccacaggggttctaaattttttgactattcgtaaccaaggcaacccataaatatagcacaaaccgattcttgattcctgagacagtttttgtagattgctactcagtttccatctttccttttggtcctggttgtggcggtccctgggacggcccacacacttggtgatttgccagaagggctcatgggacccagtggagtctgcagcattctgttacagccatcaggggcttcctccttccctcgagggcgctcacagagcatgctccttccccagccgagagaaacacatgtgcaatatgtctgcccagggataccccttagagactcagaacccaaggtttttactgagggctggtcacataggcaatccctactgagcaactttaaaaaaaaactctcccataagaaaagcaggtgttgggccaggttcaatggctcatgcctgtaatcctagcactttgggaggttgaggcaggaggcttgcttaagctcaggagttctagaccagcctgggtaacataacaagacccaatctgtacaaaaataaaataaaaaaattagcccaggatgggggcatgcacctgtggtcccagctactcaggaggtggaggatcacttgagcctgggaggtggaggttgcagtgagccaagattacaccactgcactccagcctgggcaacagagcaagaccctgtctcaaaaataaataaataaatgaagaaaagaaaaaaagcagttatttatcctaacccatattgtttgcatacacaggctaggcacagtgagtcacccttatcagccagggaatggaggagtggttcaagtgccaagttcccagaagccagctcagagctgacctcacgggtggactgttttaaagatagcagcactgggcctcaagtccatgaggtcttttctcagtcaggacctggcccggctctcccaaataaatgatcagctatggggttgctttcctcttagctcacttttcttccagctgcgacccttggcttcctccctccctcccgtggggacctcccatcgtacttaaggcacagctgttgagtggggctctccgtgcctgttttgaagagcctctccctctgctaattagtctttgcatctttacaactgacttaatttattttatttttatttttttgagatggagtttcgctctttgttgcccaggctggagtgcagtggcacaatctcggctcactgcaacctctgcctcctgggtttaagtgattctcctgtctcagcctcccaaatagctgggattataggcacccaccacaatgcctggctaatttttgtatttttagtagagacagggtttcaccatgttggccaggctggtcttgaactccgacctcagatgatccacctacctccgcctcccaaagtgctgggattacaggcatgagccactgagcctggccacaactgactcttaatttattgctgtgttcataccatttctaccactctggataaattttcctaacacctccataatgggtcttaacttgaggcttggattgtttcttgagggggggttctagccagggagagaatgaactctttctaactgaacagctcttccagatgctttccacaaccattcaacccacagagcaggaagtgcctgtgttagtgtctgttgccgcacattacaaacagtactaaggatacaggaaggtacaagaaactggtgccaaggttgactccatggaggggaactggatggctgtgaggggcaggtgtggaaaagagacaattcaccatatgctctgtgagagccctttaaattttgtactgtgtacaagtattactttttcaaacaaaattatttttctattattttttaagacagggtctcactctgtcgctcaggctggagtgcaatggtgtgatcgaagctcactgcagcctcaacctcccaggctcaagtgatcctcccacctcagcctcctcagtagctgtgactacagtcacatgctactatgcctggctaagttttagagtttttgtagagatgggagtctcactacattgcccaggctggtcttgagctcctgggctcaagcaatcttcccacctctgcctcctgaagtgctgggattacaaatgagctatttaacccagccaaaatttttaactaaaagaagaagaggaggaagaggaaggagatgaggaggaagaggaaggagatgaggacgagggagagaaataagaataatcataagaaggagaaggagaaaaatgaagaggaggaggaggagaacaaggggaggagggggaggagaaggagtaggtggtggtggagaatcagggcatcattattcacagtagtcaaaaggtggaaacaacccaaatgtccatcatctgatgaatggataaacaaaatgtggtgtagccataccatgaaatatttagtcataaaaaggaatgaagttctaatatctgttacgatgtagatgaacctttacaacattacacaaaaggccgggcatgggtggctcatgtctgtaatcccatcatattggaaggccaaggaaggattgctggagctcaagagtttgagaccagcctgggcaacataggaaaacctcgtctttccaaaaaaaaaaaaaaaaaaaattagccaggctggatggtggatgcctgtggtcccaactacttgggaggctggggtaggaggatcatttgcacccaggaggtgaaggctgcagtgagccgtgatcatgccattgtactccagcatggatgacagagcaagaccctgtctcaaagaaaaaaagaagaaaactgcataaaagagcgcatattttataatctcatgtatgtgagatatcccaaattggtaaatcatagagacagaaagcaggttagtggtccccaggggcttgggggaggggagaatgaggggtggctgcttagtgggaatggagtcttcctctggggtgatgaaatgttttggagatagaagtggtggttgcacaaaaaaaagtgaatgtactaaatgctactgaattgtatattttatttaatttatttttttcaagacggactttcgctctttctcccaggctggagtgaagtaggcgtgatctcgatttgctgtaacctccaccccggggttcaagtgattctcccgcctcagcctcctgaatagctgggatacaggtgcatgtcaccacgcctggctaatttttgtatttttagtaga[143 bp omitted]atgttatgtgaatttctccttgatttttttttttaaacaagaaatagagtatgctctggtaaggttcagctcggggaagttccctgtccataattaccgtgagctctagagggactggagttctaggtgccctggccaagcgcacactggggctccatgtctccactcattgacctggttggtccctggctttcccaggttccagacatcaaagggggtacgtcaacagtgcgcaccatcatgccaattaaatgccgtgatgcaccatatatacgcctaaccagcaatcaaccaaaatagcacttaggggcaaactcccacccgtgtcttacaaataactgcagttgtagaatgtacaaggaaatgacagagtctgccattaacctcaggcctgcagcatctccagactgcgctgctcacagatggcttgcactgagggaagcatcagtgtcacccggggagccaactgcaagcccatctacttcgggtccctccaggcagtgtctgctttctctaagaaacaggaatgaagaatattcttatctctacccattaggcctgaggacgactctggacttggttgataaaacaaccaaattagaaggagaagcggggcctcagcacccggaggacagatcttggtggctgtcaagcctttggttttagctgaggaggaagagagaaggcgccagagccttggggctcccctgtgagatattaatcctgaaagctatatgtgcaggccccgctgagtgccccacagtcctcaccgtggcccgaggggggagatacttttttttttttgagatggagttttgctctgtcacccaaactggagtgcaatggcgcgatctcggctcactgcaacctccgcctcccaggttcaagaaattctcctgcctcagccaggcttacaggcatccgccaccacgcccagctaatttttgtatttttagtagagattgagtttctccatgttggtcagcctggtcttgaactcctgacctcaggtgatctgcccacctcggcctcttaaagtgctgggattataggtgtgagccaccgcgcccggctggaggatgtgatcttatgacatcattcatttacttatttagagacagagtcttgctccatcacccaggctggagtgcagtggcacaatcatggctcactgcagtctcgaagtcctgcagtgagtctcaagtgatcctcccacctcagcctccctaggaactgggaccacaggtgcacgccaccacacctggctaatttttgtattttttattttgccatgttgcccagggtggtctcgaatgcctggattccagcgatcttcccaccttggccttccaaagtgctgagattccaagtgtgagcagctgagcccagccttatgatgtatgtcatctatatggttgaggaggccaagcccagccaggcaggagaggtgctccagcccaggcaatctgtaagcggcagtgctgagatgtgcacccagggct[133 bp omitted]acctccccgctatgctggggagtcttagggttagctcagggctatggctgaaatgtttgccttctgcccctgccaagttcatatgttgaaacctcaactggtgtgacggtatttgaatatggggccttggggaggtaattaggtcaaaagggtggagcccgtgtagatggatgaaagcccctataaaaagacaagagagagcttgcttccgctccgctctccaccagtaaggatacaacaaggagaggccgcctacaagccaggaagacaatcgttcagtagccttcagatccgccaacaccttgatcctgggcttgcggctgccagacctgtgagaaagcgatgcccattgtttaagcccctggtctttgatctgttaccgcagcgcgagctgaccacgcactcagtgtgaggcgatgacctttttctcaaccatgcgcaagtggtatttctgcgtgcttcaaatatcacaggccggattgtcaggaaaccaaggaggggccttttggaagagaatgatgctgagcatccgggtccctggacagccagcagccctgaggcagacagaagtttggacaactcaggacagggagcttggagggcagcccctacatgtcggagtggtccctacctgtgttgcctcaactcttccttcaaggcaagagccgctaaggacagtcaggacatcctaccgcccaaggctgttgagctcggccggccaagggtaagtctagggctggacgagctatgcctggggctcaggtgcccccggtggggctgagcacagcccaggagctgggcctggcttctctgagacttgcaagtcacacaaaatgccttctactccatggagtgagagagtggaactaagaggggggcagttttagaagctgagtgaggaggtgggagaggcacctgataagaacttgggcttggcagttagaggaacaggcagaggggttggggccaggtgcggaggcgggggatgggccacaaggtggggtaggtggggggaaggtgcagagaggaggggcggggtgggcattatggggttctgtaagagtttgggggcaggggccaggcgcagtggctcatacctgtaatcccagcactttgggaggctgaggcgggcagatcacctgaggtctggagttcaagaccaacctggccaacatggtgaaatcccatctctattaaaaatacaaaaattaggctgggtgcggtggctcatgcctgtaatcccagcactttgggaggctg[134 bp omitted]gagacaggagaattacttgaacctgggaggcagaggttgcagtgagccgagatcacgccactgcactccagcctgggcgacagcgtgagactctgtctcaaaaacaacaacaaaaaacaaacaaacaaaaacaaaaattagtcgggtgtggtggcgggtgcctgtaatcccagctactcaggaggctgaggcaggagaatcaattgaacccaggaggtggaggttgcagtgagctgagatcgcaccattgcacttcagcctgggcgacagagcgaaactctgtctcaagaaaaaaatttaaaaagagagagagagagttcgggagaacgggagcagaggtccctggagatgttcccatttcctgggtctccagcagcccccactgacatctcactgagtccctgtgttctctgatattcctgaacaagacccaattcattatcatcctaaaaattgacttagggaaaaaaaaagtagagccttcagctcaaagaactgctgagatctgggatgatggatggctttattagcatgcttcaattttatatttatcaaattaaaccagcagccaagggacacttaattaagattctttgtcatcagtcagaggagagaagatgggggagagaaagggcttatgacccatattctagaaggaaaggtttaagtgcccaaaataatatgtcagaggcccttgggagggtttggtggcttgcagtaatgagggctgtcttcaccgtgggaatccgaggatgggttcgagtctttcttccttaagtgttttctctttattaagctctcatcagagatgcgacatttattcagtgctggtcctccatgttaacaaacacaccatgtctgtaagatatcagagcacagggcagccagggagtctgggttcaaatcccgactctccttactaattgcataatcatgggcaagttacttcattaaaaaaaaaaaaaaactgggatataattcacataaaattcacccctttagagtgtacaattcagtagtttttagtatatttataaattcttagtatattcaccattgtgcaaacgtcactttccagttaaaacatttccatcacccctgcattagtccgttttcaccctgctgataaagacatacctgagactgggcaatttacaaaagaaagaggtttattggacttacagttccacatggctggggaggcctcacagccatggtggaagactaggaggagcaagccacatcttacgtggatggcagcaggcaaagagagagcttgtgcaaggaaactcctctttttaaaaccaacagattggcctggcgtggtggcgtatgcctataatcccagcactttgggaggctgaggtgagcggatcacctgaggtcaggagtttgagaccagtctggccaacatggtgaaacccagtctctactaaaaatacaaaaaaattagcccattgtgatggtgtatgtttgtaatcccagctactcaggaggctgaagcaggagaatcacttgaacctgggaggaagaggttacagtgagctgagatcatgccactgcattccagcctgggcaaaaagagcaaaattccatctcaaaataattaaaaataaaaaataaaaccatcagatcttgtgagactcattcactatcacgagaacagcacgggaaagacccgcccccgtgattcaatcacctcctactgg
